(19) United States
(12) Patent Application Publication
(10) Pub. No.: US 2025/0059283 A1
(43) Pub. Date: Feb. 20, 2025

(54) CHIMERIC ANTIGEN RECEPTORS TARGETING FC RECEPTOR-LIKE 5 AND USES THEREOF

(71) Applicants: MEMORIAL SLOAN-KETTERING CANCER CENTER, New York, NY (US); EUREKA THERAPEUTICS, INC., Emeryville, CA (US)

(72) Inventors: Renier J. Brentjens, Short Hills, NJ (US); Eric L. Smith, Brookline, MA (US); Cheng Liu, Emeryville, CA (US)

(73) Assignees: MEMORIAL SLOAN-KETTERING CANCER CENTER, New York, NY (US); EUREKA THERAPEUTICS, INC., Emeryville, CA (US)

(21) Appl. No.: 18/909,536

(22) Filed: Oct. 8, 2024

Related U.S. Application Data
(62) Division of application No. 17/332,853, filed on May 27, 2021, now Pat. No. 12,139,538.
Application No. 17/332,853 is a division of application No. 15/614,108, filed on Jun. 5, 2017, now Pat. No. 11,059,891.
Application No. 15/614,108 is a continuation of application No. PCT/US2015/064134, filed on Dec. 4, 2015.
(60) Provisional application No. 62/088,164, filed on Dec. 5, 2014.

(51) Int. Cl. C07K 16/28; A61K 39/00; C07K 14/705; C07K 14/725; C07K 16/30; C12N 5/0783; C12N 9/12; C12N 15/86

(52) U.S. Cl. CPC C07K 16/283; A61K 39/4611; A61K 39/4631; A61K 39/464402; A61K 39/464412; A61K 2239/48; C07K 14/7051; C07K 14/70517; C07K 14/70521; C07K 14/7056; C07K 14/70578; C07K 16/3061; C12N 5/0636; C12N 9/1205; C12N 15/86; A61K 2039/505; C07K 2317/31; C07K 2317/34; C07K 2317/54; C07K 2317/55; C07K 2317/56; C07K 2317/565; C07K 2317/622; C07K 2317/92; C07K 2319/02; C07K 2319/03; C07K 2319/33; C07K 2319/40; C07K 2319/74; C12N 2510/00; C12N 2740/10043; C12N 2740/13043; C12N 2840/203

(57) ABSTRACT

The presently disclosed subject matter provides for methods and compositions for treating a neoplasia (e.g., multiple myeloma). It relates to chimeric antigen receptors (CARs) that specifically target Fc Receptor-like 5 (FcRL5), e.g., domain 9 of FcRL5, and immunoresponsive cells comprising such CARs. The presently disclosed FcRL5-targeted CARs have enhanced immune-activating properties, including anti-tumor activity.

### CROSS-REFERENCE TO RELATED APPLICATIONS

[0001] This application is a Divisional of U.S. patent application Ser. No. 17/332,853, filed May 27, 2021, which is a Divisional of U.S. patent application Ser. No. 15/614,108, filed Jun. 5, 2017, which is a Continuation of International Application Serial No. PCT/US2015/064134, filed Dec. 4, 2015, which claims priority to U.S. Provisional Patent Application Ser. No. 62/088,164, filed Dec. 5, 2014, the contents of each of which are incorporated by reference in their entirety, and to each of which priority is claimed.

### SEQUENCE LISTING

[0002] The specification further incorporates by reference the Sequence Listing submitted herewith on Oct. 3, 2024. The Sequence Listing file, identified as 072734.1655.xml, is 1,810,260 bytes and was created on Oct. 3, 2024. The Sequence Listing, electronically filed herewith, does not extend beyond the scope of the specification and thus does not contain new matter.

### INTRODUCTION

[0003] The presently disclosed subject matter provides for methods and compositions for treating cancer. It relates to chimeric antigen receptors (CARs) that specifically target Fc Receptor-like 5 (FcRL5), e.g., domain 9 of FcRL5, immunoresponsive cells comprising such CARs, and methods of using such cells for treating cancer (e.g., multiple myeloma).

### BACKGROUND OF THE INVENTION

[0004] Cell-based immunotherapy is a therapy with curative potential for the treatment of cancer. T cells and other immune cells may be modified to target tumor antigens through the introduction of genetic material coding for artificial or synthetic receptors for antigen, termed Chimeric Antigen Receptors (CARs), specific to selected antigens. Targeted T cell therapy using CARs has shown recent clinical success in treating hematologic malignancies.

[0005] Multiple myeloma (MM) is the second most common hematologic malignancy mortality (Siegel et al., CA:a cancer journal for clinicians 63, 11-30 (2013)). Approximately 25% of patients have high-risk cytogenetics, which portends a median survival of less then 2 years (Boyd et al., Genes, chromosomes & cancer 50, 765-774 (2011); Shaughnessy et al., Blood 109, 2276-2284 (2007)). While recent strides have been made, regardless of cytogenetics, the disease is still considered incurable outside the immuno-therapeutic graft versus myeloma (GvM) effect of an allogeneic transplant. However, allogeneic transplants are limited by ineligibility and high rates of transplant-associated morbidity and mortality (Gahrton et al., The New England journal of medicine 325, 1267-1273 (1991)). Similar to the GvM effect, a potentially curative T cell effect may be achieved with minimal toxicity through autologous adoptive T cell therapy.

[0006] Myeloma is expected to be an ideal disease to test adoptive T cell therapy. First, allogeneic transplants demonstrate that the T cell can be a curative treatment, even with minimal or no concomitant chemotherapy such as after non-myeloablative transplants or post-transplantation donor lymphocyte infusions. Second, conditioning chemotherapy, possibly through the mechanism of depleting regulatory T cells (Tregs), enhances the efficacy of adoptive T cell therapy (Brentjens et al., Blood 118, 4817-4828 (2011) and Pegram et al., Blood 119, 4133-4141(2012)) as such, the immediate post-autologous transplant period could be an optimal time to administer T cells, and myeloma is one of the few diseases where autologous stem cell transplantation is the standard of care. Third, the immunomodulatory drug lenalidomide may improve CAR based therapy, as has been shown in mice (Bertilaccio et al., Blood 122, 4171 (2013)), and lenalidomide is commonly used to treat MM. Fourth, adoptive T cell therapy works best in bone marrow predominant disease such as ALL (Brentjens et al., Science translational medicine 5, 177ra138 (2013); Davila et al., Science translational medicine 6, 224ra225 (2014)), when compared to solid tumors or extra-medullary CLL (Brentjens et al. (2011)) and similar to ALL, myeloma is a disease of the bone marrow.

[0007] While there are various reasons to expect that adoptive T cell therapy may work well in MM, expanding adoptive T cell therapy to myeloma poses unique challenges. Unlike other B-cell malignancies, CD19 expression is seen in only 2% of myeloma patients (Bataille et al., Haematologica 91, 1234-1240 (2006)). Furthermore, unlike CD19, the common extracellular immunophenotypic markers in myeloma (CD138, CD38, and CD56) are all co-expressed on other essential cell types, and CARs to any of these targets could lead to unacceptable “off tumor, on target” toxicity (Brentjens et al. (2013)) which can be fatal even in targets where antibodies are well tolerated, as was the case with a HER2 targeted CAR (Morgan et al., Molecular therapy: the journal of the American Society of Gene Therapy 18, 843-851 (2010)). Accordingly, there are needs for novel therapeutic strategies to design CARs targeting antigens that are highly expressed in MM cells and limited expression in normal tissues for treating multiple myeloma, which strategies capable of inducing potent tumor eradication with minimal toxicity and immunogenicity.

### SUMMARY OF THE INVENTION

[0008] The presently disclosed subject matter generally provides chimeric antigen receptors (CARs) that specifically target Fc Receptor-like 5 (FcRL5), immunoresponsive cells comprising such CARs, and uses of these CARs and immunoresponsive cells for treating multiple myeloma.

[0009] The presently disclosed subject matter provides CARs. In one non-limiting example, the CAR comprises an extracellular antigen-binding domain, a transmembrane domain and an intracellular domain, where the extracellular antigen-binding domain specifically binds to FcRL5. In certain embodiments, the extracellular antigen-binding domain binds to domain 9 of FcRL5.

[0010] In certain non-limiting embodiments, the extracellular antigen-binding domain is a single-chain variable fragment (scFv). In certain embodiments, the extracellular antigen-binding domain is a murine scFv. In certain embodiments, the extracellular antigen-binding domain is a human scFv. In certain non-limiting embodiments, the extracellular antigen-binding domain is a Fab, which is optionally crosslinked. In certain non-limiting embodiments, the extracellular binding domain is a F(ab)₂. In certain non-limiting embodiments, any of the foregoing molecules can be comprised in a fusion protein with a heterologous sequence to form the extracellular antigen-binding domain. In certain embodiments, the extracellular antigen-binding domain specifically binds to FcRL5 with a binding affinity (K_{d}) of from about 1×10⁻¹¹ M to about 3×10⁻⁶ M, 1×10⁻¹⁰ M to about 3×10⁻⁶ M or 1×10⁻⁹ M to about 3×10⁻⁶ M. In certain embodiments, the extracellular antigen-binding domain specifically binds to domain 8 or 9 of FcRL5 with a K_{d} of from about 1×10⁻⁹ M to about 3×10⁻⁶ M.

[0011] In certain embodiments, the extracellular antigen-binding domain comprises a light chain variable region comprising an amino acid sequence that is at least 80%, 81%, 82%, 83%, 84%, 85%, 86%, 87%, 88%, 89%, 90%, 91%, 92%, 93%, 94%, 95%, 96%, 97%, 98% or 99% homologous to an amino acid sequence selected from the group consisting of SEQ ID NO:3, SEQ ID NO:7, SEQ ID NO:11, SEQ ID NO:15, SEQ ID NO:19, SEQ ID NO:23, SEQ ID NO:27, SEQ ID NO:31, SEQ ID NO:35, SEQ ID NO:39, SEQ ID NO:43, SEQ ID NO:47, SEQ ID NO:51, SEQ ID NO:55, SEQ ID NO:59, SEQ ID NO:63, SEQ ID NO:67, SEQ ID NO:71, SEQ ID NO:75, SEQ ID NO:79, SEQ ID NO:83, SEQ ID NO:87, SEQ ID NO:91, SEQ ID NO:95, SEQ ID NO:99, SEQ ID NO:103, SEQ ID NO:107, SEQ ID NO:111, SEQ ID NO:115, SEQ ID NO:119, SEQ ID NO:123, SEQ ID NO:127, SEQ ID NO:131, SEQ ID NO:135, SEQ ID NO:139, SEQ ID NO:143, SEQ ID NO:147, SEQ ID NO:151, SEQ ID NO:155, SEQ ID NO:159, SEQ ID NO:163, SEQ ID NO:167, SEQ ID NO:171, SEQ ID NO:175, SEQ ID NO:179, SEQ ID NO:183, SEQ ID NO:187, SEQ ID NO:191, SEQ ID NO:195, SEQ ID NO:199, SEQ ID NO:203, SEQ ID NO:207, SEQ ID NO:211, SEQ ID NO:215, SEQ ID NO:219, SEQ ID NO:223, SEQ ID NO:227, SEQ ID NO:231, SEQ ID NO:235, SEQ ID NO:239, SEQ ID NO:243, SEQ ID NO:247, SEQ ID NO:251, SEQ ID NO:255, SEQ ID NO:259, SEQ ID NO:263, SEQ ID NO:267, SEQ ID NO:271, SEQ ID NO:275, SEQ ID NO:279, SEQ ID NO:283, SEQ ID NO:287, SEQ ID NO:291, SEQ ID NO:295, SEQ ID NO:299, SEQ ID NO:303, SEQ ID NO:917 and SEQ ID NO:921, wherein the extracellular antigen-binding domain binds to FcRL5.

[0012] In certain embodiments, the extracellular antigen-binding domain comprises a heavy chain variable region comprising an amino acid sequence that is at least 80%, 81%, 82%, 83%, 84%, 85%, 86%, 87%, 88%, 89%, 90%, 91%, 92%, 93%, 94%, 95%, 96%, 97%, 98% or 99% homologous to an amino acid sequence selected from the group consisting of SEQ ID NO:4, SEQ ID NO:8, SEQ ID NO:12, SEQ ID NO:16, SEQ ID NO:20, SEQ ID NO:24, SEQ ID NO:28, SEQ ID NO:32, SEQ ID NO:36, SEQ ID NO:40, SEQ ID NO:44, SEQ ID NO:48, SEQ ID NO:52, SEQ ID NO:56, SEQ ID NO:60, SEQ ID NO:64, SEQ ID NO:68, SEQ ID NO:72, SEQ ID NO:76, SEQ ID NO:80, SEQ ID NO:84, SEQ ID NO:88, SEQ ID NO:92, SEQ ID NO:96, SEQ ID NO:100, SEQ ID NO:104, SEQ ID NO:108, SEQ ID NO:112, SEQ ID NO:116, SEQ ID NO:120, SEQ ID NO:124, SEQ ID NO:128, SEQ ID NO:132, SEQ ID NO:136, SEQ ID NO:140, SEQ ID NO:144, SEQ ID NO:148, SEQ ID NO:152, SEQ ID NO:156, SEQ ID NO:160, SEQ ID NO:164, SEQ ID NO:168, SEQ ID NO:172, SEQ ID NO:176, SEQ ID NO:180, SEQ ID NO:184, SEQ ID NO:188, SEQ ID NO:192, SEQ ID NO:196, SEQ ID NO:200, SEQ ID NO:204, SEQ ID NO:208, SEQ ID NO:212, SEQ ID NO:216, SEQ ID NO:220, SEQ ID NO:224, SEQ ID NO:228, SEQ ID NO:232, SEQ ID NO:236, SEQ ID NO:240, SEQ ID NO:244, SEQ ID NO:248, SEQ ID NO:252, SEQ ID NO:256, SEQ ID NO:260, SEQ ID NO:264, SEQ ID NO:268, SEQ ID NO:272, SEQ ID NO:276, SEQ ID NO:280, SEQ ID NO:284, SEQ ID NO:288, SEQ ID NO:292, SEQ ID NO:296, SEQ ID NO:300, SEQ ID NO:304, SEQ ID NO:915 and SEQ ID NO:919, wherein the extracellular antigen-binding domain binds to FcRL5.

[0013] In certain embodiments, the extracellular antigen-binding domain comprises (a) a light chain variable region comprising an amino acid sequence that is at least 80%, 81%, 82%, 83%, 84%, 85%, 86%, 87%, 88%, 89%, 90%, 91%, 92%, 93%, 94%, 95%, 96%, 97%, 98% or 99% homologous to an amino acid sequence selected from the group consisting of SEQ ID NO:3, SEQ ID NO:7, SEQ ID NO:11, SEQ ID NO:15, SEQ ID NO:19, SEQ ID NO:23, SEQ ID NO:27, SEQ ID NO:31, SEQ ID NO:35, SEQ ID NO:39, SEQ ID NO:43, SEQ ID NO:47, SEQ ID NO:51, SEQ ID NO:55, SEQ ID NO:59, SEQ ID NO:63, SEQ ID NO:67, SEQ ID NO:71, SEQ ID NO:75, SEQ ID NO:79, SEQ ID NO:83, SEQ ID NO:87, SEQ ID NO:91, SEQ ID NO:95, SEQ ID NO:99, SEQ ID NO:103, SEQ ID NO:107, SEQ ID NO:111, SEQ ID NO:115, SEQ ID NO:119, SEQ ID NO:123, SEQ ID NO:127, SEQ ID NO:131, SEQ ID NO:135, SEQ ID NO:139, SEQ ID NO:143, SEQ ID NO:147, SEQ ID NO:151, SEQ ID NO:155, SEQ ID NO:159, SEQ ID NO:163, SEQ ID NO:167, SEQ ID NO:171, SEQ ID NO:175, SEQ ID NO:179, SEQ ID NO:183, SEQ ID NO:187, SEQ ID NO:191, SEQ ID NO:195, SEQ ID NO:199, SEQ ID NO:203, SEQ ID NO:207, SEQ ID NO:211, SEQ ID NO:215, SEQ ID NO:219, SEQ ID NO:223, SEQ ID NO:227, SEQ ID NO:231, SEQ ID NO:235, SEQ ID NO:239, SEQ ID NO:243, SEQ ID NO:247, SEQ ID NO:251, SEQ ID NO:255, SEQ ID NO:259, SEQ ID NO:263, SEQ ID NO:267, SEQ ID NO:271, SEQ ID NO:275, SEQ ID NO:279, SEQ ID NO:283, SEQ ID NO:287, SEQ ID NO:291, SEQ ID NO:295, SEQ ID NO:299, SEQ ID NO:303, SEQ ID NO:917 and SEQ ID NO:921; and (b) a heavy chain variable region comprising an amino acid sequence that is at least 80%, 81%, 82%, 83%, 84%, 85%, 86%, 87%, 88%, 89%, 90%, 91%, 92%, 93%, 94%, 95%, 96%, 97%, 98% or 99% homologous to an amino acid sequence selected from the group consisting of SEQ ID NO:4, SEQ ID NO:8, SEQ ID NO:12, SEQ ID NO:16, SEQ ID NO:20, SEQ ID NO:24, SEQ ID NO:28, SEQ ID NO:32, SEQ ID NO:36, SEQ ID NO:40, SEQ ID NO:44, SEQ ID NO:48, SEQ ID NO:52, SEQ ID NO:56, SEQ ID NO:60, SEQ ID NO:64, SEQ ID NO:68, SEQ ID NO:72, SEQ ID NO:76, SEQ ID NO:80, SEQ ID NO:84, SEQ ID NO:88, SEQ ID NO:92, SEQ ID NO:96, SEQ ID NO:100, SEQ ID NO:104, SEQ ID NO:108, SEQ ID NO:112, SEQ ID NO:116, SEQ ID NO:120, SEQ ID NO:124, SEQ ID NO:128, SEQ ID NO:132, SEQ ID NO:136, SEQ ID NO:140, SEQ ID NO:144, SEQ ID NO:148, SEQ ID NO:152, SEQ ID NO:156, SEQ ID NO:160, SEQ ID NO:164, SEQ ID NO:168, SEQ ID NO:172, SEQ ID NO:176, SEQ ID NO:180, SEQ ID NO:184, SEQ ID NO:188, SEQ ID NO:192, SEQ ID NO:196, SEQ ID NO:200, SEQ ID NO:204, SEQ ID NO:208, SEQ ID NO:212, SEQ ID NO:216, SEQ ID NO:220, SEQ ID NO:224, SEQ ID NO:228, SEQ ID NO:232, SEQ ID NO:236, SEQ ID NO:240, SEQ ID NO:244, SEQ ID NO:248, SEQ ID NO:252, SEQ ID NO:256, SEQ ID NO:260, SEQ ID NO:264, SEQ ID NO:268, SEQ ID NO:272, SEQ ID NO:276, SEQ ID NO:280, SEQ ID NO:284, SEQ ID NO:288, SEQ ID NO:292, SEQ ID NO:296, SEQ ID NO:300, SEQ ID NO:304, SEQ ID NO:915 and SEQ ID NO:919, wherein the extracellular antigen-binding domain binds to FcRL5.

[0014] In certain embodiments, the extracellular antigen-binding domain comprises a light chain variable region comprising an amino acid sequence selected from the group consisting of SEQ ID NO:3, SEQ ID NO:7, SEQ ID NO:11, SEQ ID NO:15, SEQ ID NO:19, SEQ ID NO:23, SEQ ID NO:27, SEQ ID NO:31, SEQ ID NO:35, SEQ ID NO:39, SEQ ID NO:43, SEQ ID NO:47, SEQ ID NO:51, SEQ ID NO:55, SEQ ID NO:59, SEQ ID NO:63, SEQ ID NO:67, SEQ ID NO:71, SEQ ID NO:75, SEQ ID NO:79, SEQ ID NO:83, SEQ ID NO:87, SEQ ID NO:91, SEQ ID NO:95, SEQ ID NO:99, SEQ ID NO:103, SEQ ID NO:107, SEQ ID NO:111, SEQ ID NO:115, SEQ ID NO:119, SEQ ID NO:123, SEQ ID NO:127, SEQ ID NO:131, SEQ ID NO:135, SEQ ID NO:139, SEQ ID NO:143, SEQ ID NO:147, SEQ ID NO:151, SEQ ID NO:155, SEQ ID NO:159, SEQ ID NO:163, SEQ ID NO:167, SEQ ID NO:171, SEQ ID NO:175, SEQ ID NO:179, SEQ ID NO:183, SEQ ID NO:187, SEQ ID NO:191, SEQ ID NO:195, SEQ ID NO:199, SEQ ID NO:203, SEQ ID NO:207, SEQ ID NO:211, SEQ ID NO:215, SEQ ID NO:219, SEQ ID NO:223, SEQ ID NO:227, SEQ ID NO:231, SEQ ID NO:235, SEQ ID NO:239, SEQ ID NO:243, SEQ ID NO:247, SEQ ID NO:251, SEQ ID NO:255, SEQ ID NO:259, SEQ ID NO:263, SEQ ID NO:267, SEQ ID NO:271, SEQ ID NO:275, SEQ ID NO:279, SEQ ID NO:283, SEQ ID NO:287, SEQ ID NO:291, SEQ ID NO:295, SEQ ID NO:299, SEQ ID NO:303, SEQ ID NO:917, SEQ ID NO:921 and conservative modifications thereof. In certain embodiments, the extracellular antigen-binding domain comprises a heavy chain variable region comprising an amino acid sequence selected from the group consisting of SEQ ID NO:4, SEQ ID NO:8, SEQ ID NO:12, SEQ ID NO:16, SEQ ID NO:20, SEQ ID NO:24, SEQ ID NO:28, SEQ ID NO:32, SEQ ID NO:36, SEQ ID NO:40, SEQ ID NO:44, SEQ ID NO:48, SEQ ID NO:52, SEQ ID NO:56, SEQ ID NO:60, SEQ ID NO:64, SEQ ID NO:68, SEQ ID NO:72, SEQ ID NO:76, SEQ ID NO:80, SEQ ID NO:84, SEQ ID NO:88, SEQ ID NO:92, SEQ ID NO:96, SEQ ID NO:100, SEQ ID NO:104, SEQ ID NO:108, SEQ ID NO:112, SEQ ID NO:116, SEQ ID NO:120, SEQ ID NO:124, SEQ ID NO:128, SEQ ID NO:132, SEQ ID NO:136, SEQ ID NO:140, SEQ ID NO:144, SEQ ID NO:148, SEQ ID NO:152, SEQ ID NO:156, SEQ ID NO:160, SEQ ID NO:164, SEQ ID NO:168, SEQ ID NO:172, SEQ ID NO:176, SEQ ID NO:180, SEQ ID NO:184, SEQ ID NO:188, SEQ ID NO:192, SEQ ID NO:196, SEQ ID NO:200, SEQ ID NO:204, SEQ ID NO:208, SEQ ID NO:212, SEQ ID NO:216, SEQ ID NO:220, SEQ ID NO:224, SEQ ID NO:228, SEQ ID NO:232, SEQ ID NO:236, SEQ ID NO:240, SEQ ID NO:244, SEQ ID NO:248, SEQ ID NO:252, SEQ ID NO:256, SEQ ID NO:260, SEQ ID NO:264, SEQ ID NO:268, SEQ ID NO:272, SEQ ID NO:276, SEQ ID NO:280, SEQ ID NO:284, SEQ ID NO:288, SEQ ID NO:292, SEQ ID NO:296, SEQ ID NO:300, SEQ ID NO:304, SEQ ID NO:915, SEQ ID NO:919 and conservative modifications thereof.

[0015] In certain embodiments, the extracellular antigen-binding domain comprises a heavy chain variable region comprising amino acids having the sequence set forth in SEQ ID NO:915. In certain embodiments, the extracellular antigen-binding domain comprises a light chain variable region comprising amino acids having the sequence set forth in SEQ ID NO:917. In certain embodiments, the extracellular antigen-binding domain comprises a heavy chain variable region comprising amino acids having the sequence set forth in SEQ ID NO:919. In certain embodiments, the extracellular antigen-binding domain comprises a light chain variable region comprising amino acids having the sequence set forth in SEQ ID NO:921. In certain embodiments, the extracellular antigen-binding domain comprises a heavy chain variable region comprising amino acids having the sequence set forth in SEQ ID NO:144. In certain embodiments, the extracellular antigen-binding domain comprises a light chain variable region comprising amino acids having the sequence set forth in SEQ ID NO: 143. In certain embodiments, the extracellular antigen-binding domain comprises a heavy chain variable region comprising amino acids having the sequence set forth in SEQ ID NO:216. In certain embodiments, the extracellular antigen-binding domain comprises a light chain variable region comprising amino acids having the sequence set forth in SEQ ID NO:215. In certain embodiments, the extracellular antigen-binding domain comprises a heavy chain variable region comprising amino acids having the sequence set forth in SEQ ID NO:220. In certain embodiments, the extracellular antigen-binding domain comprises a light chain variable region comprising amino acids having the sequence set forth in SEQ ID NO:219. In certain embodiments, the extracellular antigen-binding domain comprises a heavy chain variable region comprising amino acids having the sequence set forth in SEQ ID NO:236. In certain embodiments, the extracellular antigen-binding domain comprises a light chain variable region comprising amino acids having the sequence set forth in SEQ ID NO:235. In certain embodiments, the extracellular antigen-binding domain comprises a heavy chain variable region comprising amino acids having the sequence set forth in SEQ ID NO:268. In certain embodiments, the extracellular antigen-binding domain comprises a light chain variable region comprising amino acids having the sequence set forth in SEQ ID NO:267. In certain embodiments, the extracellular antigen-binding domain comprises a heavy chain variable region comprising amino acids having the sequence set forth in SEQ ID NO:116. In certain embodiments, the extracellular antigen-binding domain comprises a light chain variable region comprising amino acids having the sequence set forth in SEQ ID NO:115. In certain embodiments, the extracellular antigen-binding domain comprises a heavy chain variable region comprising amino acids having the sequence set forth in SEQ ID NO:172. In certain embodiments, the extracellular antigen-binding domain comprises a light chain variable region comprising amino acids having the sequence set forth in SEQ ID NO:171. In certain embodiments, the extracellular antigen-binding domain comprises (a) a light chain variable region comprising an amino acid sequence selected from the group consisting of SEQ ID NO:3, SEQ ID NO:7, SEQ ID NO:11, SEQ ID NO:15, SEQ ID NO:19, SEQ ID NO:23, SEQ ID NO:27, SEQ ID NO:31, SEQ ID NO:35, SEQ ID NO:39, SEQ ID NO:43, SEQ ID NO:47, SEQ ID NO:51, SEQ ID NO:55, SEQ ID NO:59, SEQ ID NO:63, SEQ ID NO:67, SEQ ID NO:71, SEQ ID NO:75, SEQ ID NO:79, SEQ ID NO:83, SEQ ID NO:87, SEQ ID NO:91, SEQ ID NO:95, SEQ ID NO:99, SEQ ID NO:103, SEQ ID NO:107, SEQ ID NO:111, SEQ ID NO:115, SEQ ID NO:119, SEQ ID NO:123, SEQ ID NO:127, SEQ ID NO:131, SEQ ID NO:135, SEQ ID NO:139, SEQ ID NO:143, SEQ ID NO:147, SEQ ID NO:151, SEQ ID NO:155, SEQ ID NO:159, SEQ ID NO:163, SEQ ID NO:167, SEQ ID NO:171, SEQ ID NO:175, SEQ ID NO:179, SEQ ID NO:183, SEQ ID NO:187, SEQ ID NO:191, SEQ ID NO:195, SEQ ID NO:199, SEQ ID NO:203, SEQ ID NO:207, SEQ ID NO:211, SEQ ID NO:215, SEQ ID NO:219, SEQ ID NO:223, SEQ ID NO:227, SEQ ID NO:231, SEQ ID NO:235, SEQ ID NO:239, SEQ ID NO:243, SEQ ID NO:247, SEQ ID NO:251, SEQ ID NO:255, SEQ ID NO:259, SEQ ID NO:263, SEQ ID NO:267, SEQ ID NO:271, SEQ ID NO:275, SEQ ID NO:279, SEQ ID NO:283, SEQ ID NO:287, SEQ ID NO:291, SEQ ID NO:295, SEQ ID NO:299, SEQ ID NO:303, SEQ ID NO:917, SEQ ID NO:921 and conservative modifications thereof; and (b) a heavy chain variable region comprising an amino acid sequence selected from the group consisting of SEQ ID NO:4, SEQ ID NO:8, SEQ ID NO:12, SEQ ID NO:16, SEQ ID NO:20, SEQ ID NO:24, SEQ ID NO:28, SEQ ID NO:32, SEQ ID NO:36, SEQ ID NO:40, SEQ ID NO:44, SEQ ID NO:48, SEQ ID NO:52, SEQ ID NO:56, SEQ ID NO:60, SEQ ID NO:64, SEQ ID NO:68, SEQ ID NO:72, SEQ ID NO:76, SEQ ID NO:80, SEQ ID NO:84, SEQ ID NO:88, SEQ ID NO:92, SEQ ID NO:96, SEQ ID NO:100, SEQ ID NO:104, SEQ ID NO:108, SEQ ID NO:112, SEQ ID NO:116, SEQ ID NO:120, SEQ ID NO:124, SEQ ID NO:128, SEQ ID NO:132, SEQ ID NO:136, SEQ ID NO:140, SEQ ID NO:144, SEQ ID NO:148, SEQ ID NO:152, SEQ ID NO:156, SEQ ID NO:160, SEQ ID NO:164, SEQ ID NO:168, SEQ ID NO:172, SEQ ID NO:176, SEQ ID NO:180, SEQ ID NO:184, SEQ ID NO:188, SEQ ID NO:192, SEQ ID NO:196, SEQ ID NO:200, SEQ ID NO:204, SEQ ID NO:208, SEQ ID NO:212, SEQ ID NO:216, SEQ ID NO:220, SEQ ID NO:224, SEQ ID NO:228, SEQ ID NO:232, SEQ ID NO:236, SEQ ID NO:240, SEQ ID NO:244, SEQ ID NO:248, SEQ ID NO:252, SEQ ID NO:256, SEQ ID NO:260, SEQ ID NO:264, SEQ ID NO:268, SEQ ID NO:272, SEQ ID NO:276, SEQ ID NO:280, SEQ ID NO:284, SEQ ID NO:288, SEQ ID NO:292, SEQ ID NO:296, SEQ ID NO:300, SEQ ID NO:304, SEQ ID NO:915, SEQ ID NO:919 and conservative modifications thereof.

[0016] In certain embodiments, the extracellular antigen-binding domain comprises (a) a heavy chain variable region comprising amino acids having the sequence set forth in SEQ ID NO:915; and (b) a light chain variable region comprising amino acids having the sequence set forth in SEQ ID NO:917. In certain embodiments, the extracellular antigen-binding domain comprises extracellular antigen-binding domain comprises (a) a heavy chain variable region comprising amino acids having the sequence set forth in SEQ ID NO:919; and (b) a light chain variable region comprising amino acids having the sequence set forth in SEQ ID NO:921. In certain embodiments, the extracellular antigen-binding domain comprises (a) a heavy chain variable region comprising amino acids having the sequence set forth in SEQ ID NO:144, and (b) a light chain variable region comprising amino acids having the sequence set forth in SEQ ID NO:143. In certain embodiments, the extracellular antigen-binding domain comprises (a) a heavy chain variable region comprising amino acids having the sequence set forth in SEQ ID NO:216, and (b) a light chain variable region comprising amino acids having the sequence set forth in SEQ ID NO:215. In certain embodiments, the extracellular antigen-binding domain comprises (a) a heavy chain variable region comprising amino acids having the sequence set forth in SEQ ID NO:220, and (b) a light chain variable region comprising amino acids having the sequence set forth in SEQ ID NO:219. In certain embodiments, the extracellular antigen-binding domain comprises (a) a heavy chain variable region comprising amino acids having the sequence set forth in SEQ ID NO:236, and (b) a light chain variable region comprising amino acids having the sequence set forth in SEQ ID NO:235. In certain embodiments, the extracellular antigen-binding domain comprises (a) a heavy chain variable region comprising amino acids having the sequence set forth in SEQ ID NO:268, and (b) a light chain variable region comprising amino acids having the sequence set forth in SEQ ID NO:267. In certain embodiments, the extracellular antigen-binding domain comprises (a) a heavy chain variable region comprising amino acids having the sequence set forth in SEQ ID NO:116, and (b) a light chain variable region comprising amino acids having the sequence set forth in SEQ ID NO:115. In certain embodiments, the extracellular antigen-binding domain comprises (a) a heavy chain variable region comprising amino acids having the sequence set forth in SEQ ID NO:172, and (b) a light chain variable region comprising amino acids having the sequence set forth in SEQ ID NO:171.

[0017] In certain non-limiting embodiments, the extracellular antigen-binding domain comprises both of said heavy and light chains, optionally with a linker sequence, for example a linker peptide, between the heavy chain variable region and the light chain variable region. For example, in certain non-limiting embodiments, the extracellular antigen-binding domain comprises (a) a heavy chain variable region comprising amino acids having the sequence set forth in SEQ ID NO:915, and (b) a light chain variable region comprising amino acids having the sequence set forth in SEQ ID NO:917, optionally with (c) a linker sequence, for example a linker peptide, between the heavy chain variable region and the light chain variable region. In certain embodiments, the extracellular antigen-binding domain comprises (a) a heavy chain variable region comprising amino acids having the sequence set forth in SEQ ID NO:919 and (b) a light chain variable region comprising amino acids having the sequence set forth in SEQ ID NO:92, optionally with (c) a linker sequence, for example a linker peptide, between the heavy chain variable region and the light chain variable region. In certain embodiments, the extracellular antigen-binding domain comprises (a) a heavy chain variable region comprising amino acids having the sequence set forth in SEQ ID NO:144 and (b) a light chain variable region comprising amino acids having the sequence set forth in SEQ ID NO:143, optionally with (c) a linker sequence, for example a linker peptide, between the heavy chain variable region and the light chain variable region. In certain embodiments, the extracellular antigen-binding domain comprises (a) a heavy chain variable region comprising amino acids having the sequence set forth in SEQ ID NO:216 and (b) a light chain variable region comprising amino acids having the sequence set forth in SEQ ID NO:215, optionally with (c) a linker sequence, for example a linker peptide, between the heavy chain variable region and the light chain variable region. In certain embodiments, the extracellular antigen-binding domain comprises (a) a heavy chain variable region comprising amino acids having the sequence set forth in SEQ ID NO:220 and (b) a light chain variable region comprising amino acids having the sequence set forth in SEQ ID NO:219, optionally with (c) a linker sequence, for example a linker peptide, between the heavy chain variable region and the light chain variable region. In certain embodiments, the extracellular antigen-binding domain comprises (a) a heavy chain variable region comprising amino acids having the sequence set forth in SEQ ID NO:236 and (b) a light chain variable region comprising amino acids having the sequence set forth in SEQ ID NO:235, optionally with (c) a linker sequence, for example a linker peptide, between the heavy chain variable region and the light chain variable region. In certain embodiments, the extracellular antigen-binding domain comprises (a) a heavy chain variable region comprising amino acids having the sequence set forth in SEQ ID NO:268 and (b) a light chain variable region comprising amino acids having the sequence set forth in SEQ ID NO:267, optionally with (c) a linker sequence, for example a linker peptide, between the heavy chain variable region and the light chain variable region. In certain embodiments, the extracellular antigen-binding domain comprises (a) a heavy chain variable region comprising amino acids having the sequence set forth in SEQ ID NO:116 and (b) a light chain variable region comprising amino acids having the sequence set forth in SEQ ID NO:115, optionally with (c) a linker sequence, for example a linker peptide, between the heavy chain variable region and the light chain variable region. In certain embodiments, the extracellular antigen-binding domain comprises (a) a heavy chain variable region comprising amino acids having the sequence set forth in SEQ ID NO:172 and (b) a light chain variable region comprising amino acids having the sequence set forth in SEQ ID NO:171, optionally with (c) a linker sequence, for example a linker peptide, between the heavy chain variable region and the light chain variable region.

[0018] In certain embodiments, the extracellular antigen-binding domain comprises (a) a heavy chain variable region CDR3 comprising an amino acid sequence selected from the group consisting of SEQ ID NOs: 311, 317, 323, 328, 334, 337, 342, 347, 351, 356, 362, 368, 374, 376, 380, 384, 389, 394, 396, 400, 405, 408, 412, 415, 422, 427, 432, 437, 442, 446, 451, 453, 456, 458, 459, 463, 464, 467, 473, 476, 482, 486, 489, 492, 494, 497, 502, 507, 512, 517, 522, 527, 529, 532, 536, 539, 543, 546, 550, 553, 555, 561, 567, 570, 574, 577, 578, 579, 584, 578, 587, 591, 925 and 931; and (b) a light chain variable region CDR3 comprising an amino acid sequence selected from the group consisting of SEQ ID NOs: 314, 320, 325, 331, 339, 345, 350, 353, 359, 365, 371, 377, 383, 386, 392, 395, 399, 402, 407, 410, 414, 418, 419, 424, 430, 435, 439, 443, 449, 452, 455, 457, 462, 465, 470, 479, 485, 488, 491, 493, 495, 499, 505, 509, 514, 519, 524, 528, 530, 531, 535, 541, 542, 545, 549, 554, 558, 564, 569, 573, 576, 581, 592, 928 and 934.

[0019] In certain embodiments, the extracellular antigen-binding domain comprises: (a) a heavy chain variable region CDR1 comprising an amino acid sequence selected from the group consisting of SEQ ID NOs: 309, 315, 321, 326, 332, 335, 340, 346, 354, 360, 366, 372, 378, 387, 393, 403, 411, 420, 425, 436, 440, 444, 471, 480, 500, 510, 515, 520, 525, 537, 551, 559, 565, 582, 589, 923 and 929; (b) a heavy chain variable region CDR2 comprising an amino acid sequence selected from the group consisting of SEQ ID NOs: 310, 316, 322, 327, 333, 336, 341, 355, 361, 367, 373, 379, 388, 404, 412, 421, 426, 431, 441, 445, 450, 466, 472, 475, 481, 496, 501, 506, 511, 516, 521, 526, 538, 552, 560, 566, 583, 590, 924 and 930; (c) a heavy chain variable region CDR3 comprising an amino acid sequence selected from the group consisting of SEQ ID NOs: 311, 317, 323, 328, 334, 337, 342, 347, 351, 356, 362, 368, 374, 376, 380, 384, 389, 394, 396, 400, 405, 408, 412, 415, 422, 427, 432, 437, 442, 446, 451, 453, 456, 458, 459, 463, 464, 467, 473, 476, 482, 486, 489, 492, 494, 497, 502, 507, 512, 517, 522, 527, 529, 532, 536, 539, 543, 546, 550, 553, 555, 561, 567, 570, 574, 577, 578, 579, 584, 578, 587, 591, 925 and 931; (d) a light chain variable region CDR1 comprising an amino acid sequence selected from the group consisting of SEQ ID NOs: 312, 318, 324, 329, 338, 343, 348, 352, 357, 363, 369, 381, 390, 397, 401, 406, 416, 423, 428, 433, 447, 460, 468, 474, 477, 483, 490, 498, 503, 508, 518, 533, 540, 544, 547, 556, 562, 568, 571, 580, 585, 588, 926 and 932; (e) a light chain variable region CDR2 comprising an amino acid sequence selected from the group consisting of SEQ ID NOs: 313, 319, 330, 344, 349, 358, 364, 370, 382, 385, 391, 398, 409, 417, 429, 434, 438, 448, 454, 461, 469, 478, 484, 487, 504, 513, 523, 534, 429, 448, 548, 557, 563, 572, 575, 586, 927 and 933; and (f) a light chain variable region CDR3 comprising an amino acid sequence selected from the group consisting of SEQ ID NOs: 314, 320, 325, 331, 339, 345, 350, 353, 359, 365, 371, 377, 383, 386, 392, 395, 399, 402, 407, 410, 414, 418, 419, 424, 430, 435, 439, 443, 449, 452, 455, 457, 462, 465, 470, 479, 485, 488, 491, 493, 495, 499, 505, 509, 514, 519, 524, 528, 530, 531, 535, 541, 542, 545, 549, 554, 558, 564, 569, 573, 576, 581, 592, 928 and 934.

[0020] In certain embodiments, the extracellular antigen-binding domain comprises (a) a heavy chain variable region CDR1 comprising amino acids having the sequence set forth in SEQ ID NO:923 or conservative modifications thereof, (b) a heavy chain variable region CDR2 comprising amino acids having the sequence set forth in SEQ ID NO:924 or conservative modifications thereof, and (c) a heavy chain variable region CDR3 comprising amino acids having the sequence set forth in SEQ ID NO:925 or conservative modifications thereof. In certain embodiments, the extracellular antigen-binding domain comprises (a) a light chain variable region CDR1 comprising amino acids having the sequence set forth in SEQ ID NO:926 or conservative modifications thereof, (b) a light chain variable region CDR2 comprising amino acids having the sequence set forth in SEQ ID NO:927 or conservative modifications thereof, and (c) a light chain variable region CDR3 comprising amino acids having the sequence set forth in SEQ ID NO:928 or conservative modifications thereof.

[0021] In certain embodiments, the extracellular antigen-binding domain comprises (a) a heavy chain variable region CDR1 comprising amino acids having the sequence set forth in SEQ ID NO:929 or conservative modifications thereof, (b) a heavy chain variable region CDR2 comprising amino acids having the sequence set forth in SEQ ID NO:930 or conservative modifications thereof, and (c) a heavy chain variable region CDR3 comprising amino acids having the sequence set forth in SEQ ID NO:931 or conservative modifications thereof. In certain embodiments, the extracellular antigen-binding domain comprises (a) a light chain variable region CDR1 comprising amino acids having the sequence set forth in SEQ ID NO:932 or conservative modifications thereof, (b) a light chain variable region CDR2 comprising amino acids having the sequence set forth in SEQ ID NO:933 or conservative modifications thereof, and (c) a light chain variable region CDR3 comprising amino acids having the sequence set forth in SEQ ID NO:934 or conservative modifications thereof.

[0022] In certain embodiments, the extracellular antigen-binding domain comprises: (a) a heavy chain variable region CDR1 comprising amino acids having the sequence set forth in SEQ ID NO:923 or conservative modifications thereof, (b) a heavy chain variable region CDR2 comprising amino acids having the sequence set forth in SEQ ID NO:924 or conservative modifications thereof, (c) a heavy chain variable region CDR3 comprising amino acids having the sequence set forth in SEQ ID NO:925 or conservative modifications thereof, (d) a light chain variable region CDR1 comprising amino acids having the sequence set forth in SEQ ID NO:926 or conservative modifications thereof, (e) a light chain variable region CDR2 comprising amino acids having the sequence set forth in SEQ ID NO:927 or conservative modifications thereof, and (f) a light chain variable region CDR3 comprising amino acids having the sequence set forth in SEQ ID NO:928 or conservative modifications thereof.

[0023] In certain embodiments, the extracellular antigen-binding domain comprises: (a) a heavy chain variable region CDR1 comprising amino acids having the sequence set forth in SEQ ID NO:929 or conservative modifications thereof, (b) a heavy chain variable region CDR2 comprising amino acids having the sequence set forth in SEQ ID NO:930 or conservative modifications thereof, (c) a heavy chain variable region CDR3 comprising amino acids having the sequence set forth in SEQ ID NO:931 or conservative modifications thereof, (d) a light chain variable region CDR1 comprising amino acids having the sequence set forth in SEQ ID NO:932 or conservative modifications thereof, (e) a light chain variable region CDR2 comprising amino acids having the sequence set forth in SEQ ID NO:933 or conservative modifications thereof, and (f) a light chain variable region CDR3 comprising amino acids having the sequence set forth in SEQ ID NO:934 or conservative modifications thereof.

[0024] In certain embodiments, the extracellular antigen-binding domain comprises: (a) a heavy chain variable region CDR1 comprising the amino acid sequence of SEQ ID NO:411 or conservative modifications thereof; (b) a heavy chain variable region CDR2 comprising the amino acid sequence of SEQ ID NO:412 or conservative modifications thereof; (c) a heavy chain variable region CDR3 comprising the amino acid sequence of SEQ ID NO:463 or conservative modifications thereof; (d) a light chain variable region CDR1 comprising the amino acid sequence of SEQ ID NO:318 or conservative modifications thereof; (e) a light chain variable region CDR2 comprising the amino acid sequence of SEQ ID NO:319 or conservative modifications thereof; and (f) a light chain variable region CDR3 comprising the amino acid sequence of SEQ ID NO:419 or conservative modifications thereof.

[0025] In certain embodiments, the extracellular antigen-binding domain comprises: (a) a heavy chain variable region CDR1 comprising the amino acid sequence of SEQ ID NO:515 or conservative modifications thereof; (b) a heavy chain variable region CDR2 comprising the amino acid sequence of SEQ ID NO:516 or conservative modifications thereof; (c) a heavy chain variable region CDR3 comprising the amino acid sequence of SEQ ID NO:517 or conservative modifications thereof; (d) a light chain variable region CDR1 comprising the amino acid sequence of SEQ ID NO:318 or conservative modifications thereof; (e) a light chain variable region CDR2 comprising the amino acid sequence of SEQ ID NO:319 or conservative modifications thereof; and (f) a light chain variable region CDR3 comprising the amino acid sequence of SEQ ID NO:531 or conservative modifications thereof.

[0026] In certain embodiments, the extracellular antigen-binding comprises: (a) a heavy chain variable region CDR1 comprising the amino acid sequence of SEQ ID NO:403 or conservative modifications thereof; (b) a heavy chain variable region CDR2 comprising the amino acid sequence of SEQ ID NO:404 or conservative modifications thereof; (c) a heavy chain variable region CDR3 comprising the amino acid sequence of SEQ ID NO:532 or conservative modifications thereof; (d) a light chain variable region CDR1 comprising the amino acid sequence of SEQ ID NO:533 or conservative modifications thereof; (e) a light chain variable region CDR2 comprising the amino acid sequence of SEQ ID NO:534 or conservative modifications thereof; and (f) a light chain variable region CDR3 comprising the amino acid sequence of SEQ ID NO:535.

[0027] In certain embodiments, the extracellular antigen-binding domain comprises: (a) a heavy chain variable region CDR1 comprising the amino acid sequence of SEQ ID NO:411 or conservative modifications thereof; (b) a heavy chain variable region CDR2 comprising the amino acid sequence of SEQ ID NO:412 or conservative modifications thereof; (c) a heavy chain variable region CDR3 comprising the amino acid sequence of SEQ ID NO:543 or conservative modifications thereof; (d) a light chain variable region CDR1 comprising the amino acid sequence of SEQ ID NO:544 or conservative modifications thereof; (e) a light chain variable region CDR2 comprising the amino acid sequence of SEQ ID NO:448 or conservative modifications thereof; and (f) a light chain variable region CDR3 comprising the amino acid sequence of SEQ ID NO:545 or conservative modifications thereof.

[0028] In certain embodiments, the extracellular antigen-binding domain comprises: (a) a heavy chain variable region CDR1 comprising the amino acid sequence of SEQ ID NO:372 or conservative modifications thereof; (b) a heavy chain variable region CDR2 comprising the amino acid sequence of SEQ ID NO:475 or conservative modifications thereof; (c) a heavy chain variable region CDR3 comprising the amino acid sequence of SEQ ID NO:570 or conservative modifications thereof; (d) a light chain variable region CDR1 comprising the amino acid sequence of SEQ ID NO:571 thereof; (e) a light chain variable region CDR2 comprising the amino acid sequence of SEQ ID NO:572 or conservative modifications thereof; and (f) a light chain variable region CDR3 comprising the amino acid sequence of SEQ ID NO:573 or conservative modifications thereof.

[0029] In certain embodiments, the extracellular antigen-binding domain comprises: (a) a heavy chain variable region CDR1 comprising the amino acid sequence of SEQ ID NO:440 or conservative modifications thereof; (b) a heavy chain variable region CDR2 comprising the amino acid sequence of SEQ ID NO:441 or conservative modifications thereof; (c) a heavy chain variable region CDR3 comprising the amino acid sequence of SEQ ID NO:442 or conservative modifications thereof; (d) a light chain variable region CDR1 comprising the amino acid sequence of SEQ ID NO:329 or conservative modifications thereof; (e) a light chain variable region CDR2 comprising the amino acid sequence of SEQ ID NO:330 or conservative modifications thereof; and (f) a light chain variable region CDR3 comprising the amino acid sequence of SEQ ID NO:443 or conservative modifications thereof.

[0030] In certain embodiments, the extracellular antigen-binding domain comprises: (a) a heavy chain variable region CDR1 comprising the amino acid sequence of SEQ ID NO:309 or conservative modifications thereof; (b) a heavy chain variable region CDR2 comprising the amino acid sequence of SEQ ID NO:310 or conservative modifications thereof; (c) a heavy chain variable region CDR3 comprising the amino acid sequence of SEQ ID NO:489 or conservative modifications thereof; (d) a light chain variable region CDR1 comprising the amino acid sequence of SEQ ID NO:490 or conservative modifications thereof; (e) a light chain variable region CDR2 comprising the amino acid sequence of SEQ ID NO:313 or conservative modifications thereof; and (f) a light chain variable region CDR3 comprising the amino acid sequence of SEQ ID NO:491 or conservative modifications thereof.

[0031] In certain non-limiting embodiments, the extracellular antigen-binding domain comprises amino acids having the sequence set forth in SEQ ID NO:664 or conservative modifications thereof. In certain embodiments, the extracellular antigen-binding domain comprises amino acids having the sequence set forth in SEQ ID NO:700 or conservative modifications thereof. In certain embodiments, the extracellular antigen-binding domain comprises amino acids having the sequence set forth in SEQ ID NO:702 or conservative modifications thereof. In certain embodiments, the extracellular antigen-binding domain comprises amino acids having the sequence set forth in SEQ ID NO:710 or conservative modifications thereof. In certain embodiments, the extracellular antigen-binding domain comprises amino acids having the sequence set forth in SEQ ID NO:726 or conservative modifications thereof. In certain embodiments, the extracellular antigen-binding domain comprises amino acids having the sequence set forth in SEQ ID NO:650 or conservative modifications thereof. In certain embodiments, the extracellular antigen-binding domain comprises amino acids having the sequence set forth in SEQ ID NO:678 or conservative modifications thereof.

[0032] In certain non-limiting embodiments, the extracellular antigen-binding domain comprises (a) a heavy chain variable region CDR1 comprising amino acids having the sequence set forth in SEQ ID NO:923 or conservative modifications thereof, a heavy chain variable region CDR2 comprising amino acids having the sequence set forth in SEQ ID NO:924 or conservative modifications thereof, and a heavy chain variable region CDR3 comprising amino acids having the sequence set forth in SEQ ID NO:925 or conservative modifications thereof, and (ii) a light chain variable region CDR1 comprising amino acids having the sequence set forth in SEQ ID NO:926 or conservative modifications thereof, a light chain variable region CDR2 comprising amino acids having the sequence set forth in SEQ ID NO:927 or conservative modifications thereof, and a light chain variable region CDR3 comprising amino acids having the sequence set forth in SEQ ID NO:928 or conservative modifications thereof, optionally with (iii) a linker sequence, for example a linker peptide, between the heavy chain variable region and the light chain variable region.

[0033] In another non-limiting embodiment, the extracellular antigen-binding domain comprises (i) a heavy chain variable region CDR1 comprising amino acids having the sequence set forth in SEQ ID NO:929 or conservative modifications thereof, a heavy chain variable region CDR2 comprising amino acids having the sequence set forth in SEQ ID NO:930 or conservative modifications thereof, and a heavy chain variable region CDR3 comprising amino acids having the sequence set forth in SEQ ID NO:931 or conservative modifications thereof, and (ii) a light chain variable region CDR1 comprising amino acids having the sequence set forth in SEQ ID NO:932 or conservative modifications thereof, a light chain variable region CDR2 comprising amino acids having the sequence set forth in SEQ ID NO:933 or conservative modifications thereof, and a light chain variable region CDR3 comprising amino acids having the sequence set forth in SEQ ID NO:934 or conservative modifications thereof, optionally with (iii) a linker sequence, for example a linker peptide, between the heavy chain variable region and the light chain variable region.

[0034] In certain embodiments, the extracellular antigen-binding domain comprises: (a) a heavy chain variable region CDR1 comprising the amino acid sequence of SEQ ID NO:411 or conservative modifications thereof; (b) a heavy chain variable region CDR2 comprising the amino acid sequence of SEQ ID NO:412 or conservative modifications thereof; (c) a heavy chain variable region CDR3 comprising the amino acid sequence of SEQ ID NO:463 or conservative modifications thereof; (d) a light chain variable region CDR1 comprising the amino acid sequence of SEQ ID NO:318 or conservative modifications thereof; (e) a light chain variable region CDR2 comprising the amino acid sequence of SEQ ID NO:319 or conservative modifications thereof; and (f) a light chain variable region CDR3 comprising the amino acid sequence of SEQ ID NO:419 or conservative modifications thereof, optionally with (g) a linker sequence, for example a linker peptide, between the heavy chain variable region and the light chain variable region.

[0035] In certain embodiments, the extracellular antigen-binding domain comprises: (a) a heavy chain variable region CDR1 comprising the amino acid sequence of SEQ ID NO:515 or conservative modifications thereof; (b) a heavy chain variable region CDR2 comprising the amino acid sequence of SEQ ID NO:516 or conservative modifications thereof; (c) a heavy chain variable region CDR3 comprising the amino acid sequence of SEQ ID NO:517 or conservative modifications thereof; (d) a light chain variable region CDR1 comprising the amino acid sequence of SEQ ID NO:318 or conservative modifications thereof; (e) a light chain variable region CDR2 comprising the amino acid sequence of SEQ ID NO:319 or conservative modifications thereof; and (f) a light chain variable region CDR3 comprising the amino acid sequence of SEQ ID NO:531 or conservative modifications thereof, optionally with (g) a linker sequence, for example a linker peptide, between the heavy chain variable region and the light chain variable region.

[0036] In certain embodiments, the extracellular antigen-binding comprises: (a) a heavy chain variable region CDR1 comprising the amino acid sequence of SEQ ID NO:403 or conservative modifications thereof; (b) a heavy chain variable region CDR2 comprising the amino acid sequence of SEQ ID NO:404 or conservative modifications thereof; (c) a heavy chain variable region CDR3 comprising the amino acid sequence of SEQ ID NO:532 or conservative modifications thereof; (d) a light chain variable region CDR1 comprising the amino acid sequence of SEQ ID NO:533 or conservative modifications thereof; (e) a light chain variable region CDR2 comprising the amino acid sequence of SEQ ID NO:534 or conservative modifications thereof; and (f) a light chain variable region CDR3 comprising the amino acid sequence of SEQ ID NO:535, optionally with (g) a linker sequence, for example a linker peptide, between the heavy chain variable region and the light chain variable region. In certain embodiments, the extracellular antigen-binding domain comprises: (a) a heavy chain variable region CDR1 comprising the amino acid sequence of SEQ ID NO:411 or conservative modifications thereof; (b) a heavy chain variable region CDR2 comprising the amino acid sequence of SEQ ID NO:412 or conservative modifications thereof; (c) a heavy chain variable region CDR3 comprising the amino acid sequence of SEQ ID NO:543 or conservative modifications thereof; (d) a light chain variable region CDR1 comprising the amino acid sequence of SEQ ID NO:544 or conservative modifications thereof; (e) a light chain variable region CDR2 comprising the amino acid sequence of SEQ ID NO:448 or conservative modifications thereof; and (f) a light chain variable region CDR3 comprising the amino acid sequence of SEQ ID NO:545 or conservative modifications thereof, optionally with (g) a linker sequence, for example a linker peptide, between the heavy chain variable region and the light chain variable region.

[0037] In certain embodiments, the extracellular antigen-binding domain comprises: (a) a heavy chain variable region CDR1 comprising the amino acid sequence of SEQ ID NO:372 or conservative modifications thereof; (b) a heavy chain variable region CDR2 comprising the amino acid sequence of SEQ ID NO:475 or conservative modifications thereof; (c) a heavy chain variable region CDR3 comprising the amino acid sequence of SEQ ID NO:570 or conservative modifications thereof; (d) a light chain variable region CDR1 comprising the amino acid sequence of SEQ ID NO:571 or conservative modifications thereof; (e) a light chain variable region CDR2 comprising the amino acid sequence of SEQ ID NO:572 or conservative modifications thereof; and (f) a light chain variable region CDR3 comprising the amino acid sequence of SEQ ID NO:573 or conservative modifications thereof, optionally with (g) a linker sequence, for example a linker peptide, between the heavy chain variable region and the light chain variable region.

[0038] In certain embodiments, the extracellular antigen-binding domain comprises: (a) a heavy chain variable region CDR1 comprising the amino acid sequence of SEQ ID NO:440 or conservative modifications thereof; (b) a heavy chain variable region CDR2 comprising the amino acid sequence of SEQ ID NO:441 or conservative modifications thereof; (c) a heavy chain variable region CDR3 comprising the amino acid sequence of SEQ ID NO:442 or conservative modifications thereof; (d) a light chain variable region CDR1 comprising the amino acid sequence of SEQ ID NO:329 or conservative modifications thereof; (e) a light chain variable region CDR2 comprising the amino acid sequence of SEQ ID NO:330 or conservative modifications thereof; and (f) a light chain variable region CDR3 comprising the amino acid sequence of SEQ ID NO:443 or conservative modifications thereof, optionally with (g) a linker sequence, for example a linker peptide, between the heavy chain variable region and the light chain variable region.

[0039] In certain embodiments, the extracellular antigen-binding domain comprises: (a) a heavy chain variable region CDR1 comprising the amino acid sequence of SEQ ID NO:309 or conservative modifications thereof; (b) a heavy chain variable region CDR2 comprising the amino acid sequence of SEQ ID NO:310 or conservative modifications thereof; (c) a heavy chain variable region CDR3 comprising the amino acid sequence of SEQ ID NO:489 or conservative modifications thereof; (d) a light chain variable region CDR1 comprising the amino acid sequence of SEQ ID NO:490 or conservative modifications thereof; (e) a light chain variable region CDR2 comprising the amino acid sequence of SEQ ID NO:313 or conservative modifications thereof; and (f) a light chain variable region CDR3 comprising the amino acid sequence of SEQ ID NO:491 or conservative modifications thereof, optionally with (g) a linker sequence, for example a linker peptide, between the heavy chain variable region and the light chain variable region.

[0040] In certain embodiments, the linker peptide comprises an amino acid sequence selected from the group consisting of SEQ ID NO:307 and SEQ ID NO:897.

[0041] In certain embodiments, the extracellular antigen-binding domain binds to FcRL5 comprising the amino acid sequence set forth in SEQ ID NO:899. In certain embodiments, the extracellular antigen-binding domain binds to an epitope comprising the amino acid sequence set forth in SEQ ID NO:964. In certain embodiments, the extracellular antigen-binding domain binds to an epitope comprising the amino acid sequence set forth in SEQ ID NO:965.

[0042] In accordance with the presently disclosed subject matter, the extracellular antigen-binding domain is covalently joined to a transmembrane domain. The extracellular antigen-binding domain can comprise a signal peptide that is covalently joined to the 5′ terminus of the extracellular antigen-binding domain. In certain embodiments, the transmembrane domain of the CAR comprises a CD8 polypeptide, a CD28 polypeptide, a CD3ζ polypeptide, a CD4 polypeptide, a 4-1BB polypeptide, an OX40 polypeptide, an ICOS polypeptide, a CTLA-4 polypeptide, a PD-1 polypeptide, a LAG-3 polypeptide, a 2B4 polypeptide, a BTLA polypeptide, a synthetic peptide (not based on a protein associated with the immune response), or a combination thereof. In a non-limiting embodiment, the transmembrane domain comprises a CD8 polypeptide. In certain embodiments, the transmembrane domain comprises a CD28 polypeptide.

[0043] In accordance with the presently disclosed subject matter, in certain embodiments, the intracellular domain comprises a CD3ζ polypeptide. In certain embodiments, the intracellular domain further comprises at least one signaling region. In certain embodiments, the at least one signaling region comprises a CD28 polypeptide, a 4-1BB polypeptide, an OX40 polypeptide, an ICOS polypeptide, a DAP-10 polypeptide, a PD-1 polypeptide, a CTLA-4 polypeptide, a LAG-3 polypeptide, a 2B4 polypeptide, a BTLA polypeptide, a synthetic peptide (not based on a protein associated with the immune response), or a combination thereof. In certain embodiments, the signaling region is a co-stimulatory signaling region. In certain embodiments, the co-stimulatory signaling region comprises a CD28 polypeptide, a 4-1BB polypeptide, an OX40 polypeptide, an ICOS polypeptide, a DAP-10 polypeptide, or a combination thereof. In certain embodiments, the at least one co-stimulatory signaling region comprises a CD28 polypeptide. In certain non-limiting embodiments, the transmembrane domain comprises a CD28 polypeptide, the intracellular domain comprises a CD3ζ polypeptide, and the co-stimulatory signaling domain comprises a CD28 polypeptide. In certain non-limiting embodiments, the transmembrane domain comprises a CD8 polypeptide, the intracellular domain comprises a CD3ζ polypeptide, and the co-stimulatory signaling domain comprises a 4-1BB polypeptide.

[0044] In certain embodiments, the CAR is recombinantly expressed. The CAR can be expressed from a vector. In certain embodiments, the vector is a γ-retroviral rector.

[0045] The presently disclosed subject matter also provides isolated immunoresponsive cells comprising the above-described CARs. In certain embodiments, the isolated immunoresponsive cell is transduced with the CAR, for example, the CAR is constitutively expressed on the surface of the immunoresponsive cell. In certain embodiments, the isolated immunoresponsive cell is further transduced with at least one co-stimulatory ligand such that the immunoresponsive cell expresses the at least one co-stimulatory ligand. In certain embodiments, the at least one co-stimulatory ligand is selected from the group consisting of 4-1BBL, CD80, CD86, CD70, OX40L, CD48, TNFRSF14, and combinations thereof. In certain embodiments, the isolated immunoresponsive cell is further transduced with at least one cytokine such that the immunoresponsive cell secrets the at least one cytokine. In certain embodiments, the at least one cytokine is selected from the group consisting of IL-2, IL-3, IL-6, IL-7, IL-11, IL-12, IL-15, IL-17, IL-21, and combinations thereof. In certain embodiments, the isolated immunoresponsive cell is selected from the group consisting of a T cell, a Natural Killer (NK) cell, a cytotoxic T lymphocyte (CTL), a regulatory T cell, a human embryonic stem cell, a lymphoid progenitor cell, a T cell-precursor cell, and a pluripotent stem cell from which lymphoid cells may be differentiated. In certain embodiments, the immunoresponsive cell is a T cell. The presently disclosed subject matter further provides nucleic acid molecules encoding the presently disclosed CARs, vectors comprising the nucleic acid molecules, and host cells expressing such nucleic acid molecules. In certain embodiments, the nucleic acid molecule comprises nucleic acids having the sequence set forth in SEQ ID NO:951. In certain embodiments, the nucleic acid molecule comprises nucleic acids having the sequence set forth in SEQ ID NO:952. In certain embodiments, the vector is a γ-retroviral vector. In certain embodiments, the host cell is a T cell. Furthermore, the presently disclosed subject matter provides methods of using the above-described immunoresponsive cell for reducing tumor burden in a subject. For example, the presently disclosed subject matter provides methods of reducing tumor burden in a subject, where the method comprises administering an effective amount of the presently disclosed immunoresponsive cell to the subject, thereby inducing tumor cell death in the subject. In certain embodiments, the method reduces the number of tumor cells. In another embodiment, the method reduces the tumor size. In yet another embodiment, the method eradicates the tumor in the subject. In certain embodiments, the tumor is selected from the group consisting of multiple myeloma, Non-Hodgkin Lymphoma (especially Mantle Cell), Hodgkin Lymphoma, Chronic Lymphocytic Leukemia (CLL), Acute lymphocytic leukemia (ALL), Hairy Cell Leukemia, Burketts Lymphoma, and Waldenstrom's Macroglobulinemia. In certain embodiments, the tumor is multiple myeloma. In certain embodiments, the subject is a human. In certain embodiments, the immunoresponsive cell is a T cell.

[0046] Furthermore, the presently disclosed subject matter provides methods of using the above-described immunoresponsive cell for increasing or lengthening survival of a subject having neoplasia. For example, the presently disclosed subject matter provides methods of increasing or lengthening survival of a subject having neoplasia, where the method comprises administering an effective amount of the presently disclosed immunoresponsive cell to the subject, thereby increasing or lengthening survival of the subject. In certain embodiments, the neoplasia is selected from the group consisting of multiple myeloma, Non-Hodgkin Lymphoma (especially Mantle Cell), Hodgkin Lymphoma, Chronic Lymphocytic Leukemia (CLL), Acute lymphocytic leukemia (ALL), Hairy Cell Leukemia, Burketts Lymphoma, and Waldenstrom's Macroglobulinemia. In certain embodiments, the neoplasia is multiple myeloma. In certain embodiments, the method reduces or eradicates tumor burden in the subject.

[0047] The presently disclosed subject matter also provides methods for producing an immunoresponsive cell that binds to Fc Receptor-like 5 (FcRL5), e.g., domain 9 of FcRL5. In one non-limiting example, the method comprises introducing into the immunoresponsive cell a nucleic acid sequence that encodes a chimeric antigen receptor (CAR), which comprises an extracellular antigen-binding domain, a transmembrane domain and an intracellular domain, wherein the extracellular antigen-binding domain specifically binds to Fc Receptor-like 5 (FcRL5). In a specific non-limiting embodiment, the extracellular antigen-binding domain is an scFv.

[0048] The presently disclosed subject matter further provides pharmaceutical compositions comprising an effective amount of the presently disclosed immunoresponsive cells and a pharmaceutically acceptable excipient. In certain embodiments, the pharmaceutical compositions are for treating a neoplasia. In certain embodiments, the neoplasia is selected from the group consisting of multiple myeloma, Non-Hodgkin Lymphoma (especially Mantle Cell), Hodgkin Lymphoma, Chronic Lymphocytic Leukemia (CLL), Acute lymphocytic leukemia (ALL), Hairy Cell Leukemia, Burketts Lymphoma, and Waldenstrom's Macroglobulinemia. In certain embodiments, the neoplasia is multiple myeloma.

[0049] The presently disclosed subject matter further provides kits for treating a neoplasia, comprising the presently disclosed immunoresponsive cells. In certain embodiments, the kit further include written instructions for using the immunoresponsive cell for treating a neoplasia. In certain embodiments, the neoplasia is selected from the group consisting of multiple myeloma, Non-Hodgkin Lymphoma (especially Mantle Cell), Hodgkin Lymphoma, Chronic Lymphocytic Leukemia (CLL), Acute lymphocytic leukemia (ALL), Hairy Cell Leukemia, Burketts Lymphoma, and Waldenstrom's Macroglobulinemia. In certain embodiments, the neoplasia is multiple myeloma.

### BRIEF DESCRIPTION OF THE FIGURES

[0050] The following Detailed Description, given by way of example, but not intended to limit the invention to specific embodiments described, may be understood in conjunction with the accompanying drawings.

[0051] FIGS. 1A-1D depict the FcRL5 expression in various normal tissues and human cancer cell lines.

[0052] FIG. 2 depicts the screening of anti-FcRL5 scFvs using 3T3 cells expressing FcRL5 or FcRL1, 2, 3, 4 or 6.

[0053] FIGS. 3A-3E. (FIG. 3A) A representation of the domains of FcRL5 and the soluble, glycosylphosphatidylinositol (GPI)-anchored and transmembrane forms of FcRL5. (FIG. 3B) A representation of the vector used to express a mutated form of FcRL5 that lacks domain 9 (also referred to herein as FcRL5Δdom9). (FIG. 3C) The nucleotide sequences of full length FcRL5 and the form of FcRL5 that lacks domain 9. (FIGS. 3D and 3E) A representation of the differences in the nucleotide sequences of full length FcRL5 and the mutated form of FcRL5 in which domain 9 is deleted (referred to herein as “FcRL5Δdom9”).

[0054] FIG. 4 depicts the screening of anti-FcRL5 scFv ET200-39 on 3T3 cells expressing FcRL5Δdom9.

[0055] FIG. 5 depicts the screening of anti-FcRL5 scFv ET200-104 on 3T3 cells expressing FcRL5Δdom9.

[0056] FIGS. 6A and 6B depict the screening of anti-FcRL5 scFv ET200-105 on 3T3 cells expressing FcRL5Δdom9.

[0057] FIG. 7 depicts the screening of anti-FcRL5 scFv ET200-109 on 3T3 cells expressing FcRL5Δdom9.

[0058] FIG. 8 depicts the screening of anti-FcRL5 scFv ET200-117 on 3T3 cells expressing FcRL5Δdom9.

[0059] FIGS. 9A-9B. Schematics of chimeric antigen receptor targeting FcRL5 in accordance with non-limiting embodiments of the presently disclosed subject matter. (FIG. 9A) Schematic of FcRL5-targeted CAR with CD28 co-stimulatory domain and CD3zeta. (FIG. 9B) Schematic of FcRL5-targeted CAR with 4-1BB co-stimulatory domain and CD3zeta.

[0060] FIG. 10 depicts the vector map of a chimeric antigen receptor targeting FcRL5 using scFV ET200-31 in accordance with one non-limiting embodiment of the presently disclosed subject matter.

[0061] FIG. 11 depicts the vector map of a chimeric antigen receptor targeting FcRL5 using scFV ET200-39 in accordance with one non-limiting embodiment of the presently disclosed subject matter.

[0062] FIG. 12 depicts the vector map of a chimeric antigen receptor targeting FcRL5 using scFV ET200-69 in accordance with one non-limiting embodiment of the presently disclosed subject matter.

[0063] FIG. 13 depicts the vector map of a chimeric antigen receptor targeting FcRL5 using scFV ET200-104 in accordance with one non-limiting embodiment of the presently disclosed subject matter.

[0064] FIG. 14 depicts the vector map of a chimeric antigen receptor targeting FcRL5 using scFV ET200-105 in accordance with one non-limiting embodiment of the presently disclosed subject matter.

[0065] FIG. 15 depicts the vector map of a chimeric antigen receptor targeting FcRL5 using scFV ET200-109 in accordance with one non-limiting embodiment of the presently disclosed subject matter.

[0066] FIG. 16 depicts the vector map of a chimeric antigen receptor targeting FcRL5 using scFV ET200-117 in accordance with one non-limiting embodiment of the presently disclosed subject matter.

[0067] FIG. 17 depicts the expression of FcRL5-targeted chimeric antigen receptors on the surface of transduced T cells.

[0068] FIG. 18 depicts the cytotoxicity of FcRL5-targeted chimeric antigen receptor T cells for FcRL5-expressing cells.

[0069] FIG. 19 depicts the induction of cytokine secretion of FcRL5-targeted chimeric antigen receptor T cells.

[0070] FIG. 20 depicts the proliferation of FcRL5-targeted chimeric antigen receptor T cells upon antigen stimulation.

[0071] FIG. 21 illustrates the CLIPS technology. The CLIPS reaction takes place between bromo groups of the CLIPS scaffold and thiol sidechains of cysteines. The reaction is fast and specific under mild conditions. Using this elegant chemistry, native protein sequences are transformed into CLIPS constructs with a range of structures. From left to right: two different single T2 loops, T3 double loop, conjugated T2+ T3 loops, stabilized beta sheet, and stabilized alpha helix (Timmerman et al., J. Mol. Recognit. 2007; 20: 283-29).

[0072] FIG. 22 illustrates combinatorial clips library screening. The target protein (left) containing a discontinuous conformational epitope is converted into a matrix library (middle). Combinatorial peptides are synthesized on a proprietary minicard and chemically converted into spatially defined CLIPS constructs (right).

[0073] FIG. 23 depicts T3 looped CLIPS™ construct.

[0074] FIGS. 24A-24D illustrate heat map technology. (FIG. 24A) Table of combined peptides, with two sub-sequences indicated as “Loop 1” and “Loop 2.” (FIG. 24B) Data from A displayed as a matrix. (FIG. 24C) Color bar indication of the heat map representation. (FIG. 24D) Heat map visualization of data from A.

[0075] FIGS. 25A-25D show heatmap analysis of data recorded for Herceptin.

[0076] FIGS. 26A-26D show heatmap analysis of data recorded for ET200-104.

[0077] FIG. 27 illustrates a 3D model of amino acid residues 380-731 of FcRL55 with peptide stretch₆₅₇SRPILTFRAPR₆₆₇ highlighted.

### DETAILED DESCRIPTION OF THE INVENTION

[0078] The presently disclosed subject matter generally provides FcRL5-targeted chimeric antigen receptors (CARs). In one non-limiting example, the CAR comprises an extracellular antigen-binding domain, a transmembrane domain and an intracellular domain, where the extracellular antigen-binding domain specifically binds to FcRL5. In certain embodiments, the extracellular antigen-binding domain specifically binds to domain 7, 8 or 9 of FcRL5. The presently disclosed subject matter also provides immunoresponsive cells (e.g., T cell, a Natural Killer (NK) cell, a cytotoxic T lymphocyte (CTL), a regulatory T cell, a human embryonic stem cell, a lymphoid progenitor cell, a T cell-precursor cell, and a pluripotent stem cell from which lymphoid cells may be differentiated) expressing the FcRL5-targeted CARs, and methods of using such immunoresponsive cells for treating a tumor, e.g., multiple myeloma.

### I. Definitions

[0079] Unless defined otherwise, all technical and scientific terms used herein have the meaning commonly understood by a person skilled in the art to which this invention belongs. The following references provide one of skill with a general definition of many of the terms used in this invention: Singleton et al., Dictionary of Microbiology and Molecular Biology (2nd ed. 1994); The Cambridge Dictionary of Science and Technology (Walker ed., 1988); The Glossary of Genetics, 5th Ed., R. Rieger et al. (eds.), Springer Verlag (1991); and Hale & Marham, The Harper Collins Dictionary of Biology (1991). As used herein, the following terms have the meanings ascribed to them below, unless specified otherwise.

[0080] As used herein, the term “about” or “approximately” means within an acceptable error range for the particular value as determined by one of ordinary skill in the art, which will depend in part on how the value is measured or determined, i.e., the limitations of the measurement system. For example, “about” can mean within 3 or more than 3 standard deviations, per the practice in the art. Alternatively, “about” can mean a range of up to 20%, preferably up to 10%, more preferably up to 5%, and more preferably still up to 1% of a given value. Alternatively, particularly with respect to biological systems or processes, the term can mean within an order of magnitude, preferably within 5-fold, and more preferably within 2-fold, of a value.

[0081] As used herein, the term “cell population” refers to a group of at least two cells expressing similar or different phenotypes. In non-limiting examples, a cell population can include at least about 10, at least about 100, at least about 200, at least about 300, at least about 400, at least about 500, at least about 600, at least about 700, at least about 800, at least about 900, at least about 1000 cells expressing similar or different phenotypes.

[0082] As used herein, the term “antibody” means not only intact antibody molecules, but also fragments of antibody molecules that retain immunogen-binding ability. Such fragments are also well known in the art and are regularly employed both in vitro and in vivo. Accordingly, as used herein, the term “antibody” means not only intact immunoglobulin molecules but also the well-known active fragments F(ab′)₂, and Fab. F(ab′)₂, and Fab fragments that lack the Fe fragment of intact antibody, clear more rapidly from the circulation, and may have less non-specific tissue binding of an intact antibody (Wahl et al., J. Nucl. Med. 24:316-325 (1983). The antibodies of the invention comprise whole native antibodies, bispecific antibodies; chimeric antibodies; Fab, Fab′, single chain V region fragments (scFv), fusion polypeptides, and unconventional antibodies.

[0083] As used herein, the term “single-chain variable fragment” or “scFv” is a fusion protein of the variable regions of the heavy (V_{H}) and light chains (V_{L}) of an immunoglobulin (e.g., mouse or human) covalently linked to form a V_{H}::V_{L} heterodimer. The heavy (V_{H}) and light chains (V_{L}) are either joined directly or joined by a peptide-encoding linker (e.g., 10, 15, 20, 25 amino acids), which connects the N-terminus of the V_{H} with the C-terminus of the V_{L}, or the C-terminus of the V_{H} with the N-terminus of the V_{L}. The linker is usually rich in glycine for flexibility, as well as serine or threonine for solubility. The linker can link the heavy chain variable region and the light chain variable region of the extracellular antigen-binding domain. Non-limiting examples of linkers are disclosed in Shen et al., Anal. Chem. 80(6):1910-1917 (2008) and WO 2014/087010, the contents of which are hereby incorporated by reference in their entireties. In certain embodiments, the linker is a G4S linker. In a non-limiting example, the linker comprises amino acids having the sequence set forth in SEQ ID NO:897 as provided below.

[0084] GGGGSGGGGSGGGGS [SEQ ID NO: 897]. In certain embodiments, the nucleic acid sequence encoding the amino acid sequence of SEQ ID NO:897 is set forth in SEQ ID NO:898, which is provided below:

[SEQ ID NO: 898]
GGTGGAGGTGGATCAGGTGGAGGTGGATCTGGTGGAGGTGGATCT.

[0085] In another non-limiting example, the linker comprises amino acids having the sequence set forth in SEQ ID NO:307 as provided below: SRGGGGSGGGGSGGGGSLEMA [SEQ ID NO: 307] In certain embodiments, the nucleic acid sequence encoding the amino acid sequence of SEQ ID NO:307 is set forth in SEQ ID NO:305, which is provided below:

[SEQ ID NO: 305]
TCTAGAGGTGGTGGTGGTAGCGGCGGCGGCGGCTCTGGTGGTGGTGGAT
CCCTCGAGATGGCC.

[0086] Despite removal of the constant regions and the introduction of a linker, scFv proteins retain the specificity of the original immunoglobulin. Single chain Fv polypeptide antibodies can be expressed from a nucleic acid comprising V_{H}—and V_{L}-encoding sequences as described by Huston, et al. (Proc. Nat. Acad. Sci. USA, 85:5879-5883, 1988). See, also, U.S. Pat. Nos. 5,091,513, 5,132,405 and 4,956,778; and U.S. Patent Publication Nos. 20050196754 and 20050196754. Antagonistic scFvs having inhibitory activity have been described (see, e.g., Zhao et al., Hyrbidoma (Larchmt) 2008 27(6):455-51; Peter et al., J Cachexia Sarcopenia Muscle 2012 August 12; Shieh et al., J Imunol2009 183(4):2277-85; Giomarelli et al., Thromb Haemost 2007 97(6):955-63; Fife eta., J Clin Invst 2006 116(8):2252-61; Brocks et al., Immunotechnology 1997 3(3):173-84; Moosmayer et al., Ther Immunol 1995 2(10:31-40). Agonistic scFvs having stimulatory activity have been described (see, e.g., Peter et al., J Bioi Chern 2003 25278(38):36740-7; Xie et al., Nat Biotech 1997 15(8):768-71; Ledbetter et al., Crit Rev Immunol1997 17(5-6):427-55; Ho et al., BioChim Biophys Acta 2003 1638(3):257-66).

[0087] As used herein, “F(ab)” refers to a fragment of an antibody structure that binds to an antigen but is monovalent and does not have a Fc portion, for example, an antibody digested by the enzyme papain yields two F(ab) fragments and an Fc fragment (e.g., a heavy (H) chain constant region; Fc region that does not bind to an antigen).

[0088] As used herein, “F(ab′)₂” refers to an antibody fragment generated by pepsin digestion of whole IgG antibodies, wherein this fragment has two antigen binding (ab′) (bivalent) regions, wherein each (ab′) region comprises two separate amino acid chains, a part of a H chain and a light (L) chain linked by an S—S bond for binding an antigen and where the remaining H chain portions are linked together. A “F(ab′)₂” fragment can be split into two individual Fab′ fragments.

[0089] As used herein, the term “vector” refers to any genetic element, such as a plasmid, phage, transposon, cosmid, chromosome, virus, virion, etc., which is capable of replication when associated with the proper control elements and which can transfer gene sequences into cells. Thus, the term includes cloning and expression vehicles, as well as viral vectors and plasmid vectors.

[0090] As used herein, the term “expression vector” refers to a recombinant nucleic acid sequence, i.e., recombinant DNA molecule, containing a desired coding sequence and appropriate nucleic acid sequences necessary for the expression of the operably linked coding sequence in a particular host organism. Nucleic acid sequences necessary for expression in prokaryotes usually include a promoter, an operator (optional), and a ribosome binding site, often along with other sequences. Eukaryotic cells are known to utilize promoters, enhancers, and termination and polyadenylation signals.

[0091] As used herein, “CDRs” are defined as the complementarity determining region amino acid sequences of an antibody which are the hypervariable regions of immunoglobulin heavy and light chains. See, e.g., Kabat et al., Sequences of Proteins of Immunological Interest, 4th U. S. Department of Health and Human Services, National Institutes of Health (1987). Generally, antibodies comprise three heavy chain and three light chain CDRs or CDR regions in the variable region. CDRs provide the majority of contact residues for the binding of the antibody to the antigen or epitope. In certain embodiments, the CDRs regions are delineated using the Kabat system (Kabat, E. A., et al. (1991) Sequences of Proteins of Immunological Interest, Fifth Edition, U.S. Department of Health and Human Services, NIH Publication No. 91-3242).

[0092] As used herein, the term “affinity” is meant a measure of binding strength. Without being bound to theory, affinity depends on the closeness of stereochemical fit between antibody combining sites and antigen determinants, on the size of the area of contact between them, and on the distribution of charged and hydrophobic groups. Affinity also includes the term “avidity,” which refers to the strength of the antigen-antibody bond after formation of reversible complexes. Methods for calculating the affinity of an antibody for an antigen are known in the art, comprising use of binding experiments to calculate affinity. Antibody activity in functional assays (e.g., flow cytometry assay) is also reflective of antibody affinity. Antibodies and affinities can be phenotypically characterized and compared using functional assays (e.g., flow cytometry assay).

[0093] Nucleic acid molecules useful in the methods of the invention include any nucleic acid molecule that encodes a polypeptide of the invention or a fragment thereof. Such nucleic acid molecules need not be 100% identical with an endogenous nucleic acid sequence, but will typically exhibit substantial identity. Polynucleotides having “substantial identity” to an endogenous sequence are typically capable of hybridizing with at least one strand of a double-stranded nucleic acid molecule. By “hybridize” is meant pair to form a double-stranded molecule between complementary polynucleotide sequences (e.g., a gene described herein), or portions thereof, under various conditions of stringency. (See, e.g., Wahl, G. M. and S. L. Berger (1987) Methods Enzymol. 152:399; Kimmel, A. R. (1987) Methods Enzymol. 152:507).

[0094] For example, stringent salt concentration will ordinarily be less than about 750 mM NaCl and 75 mM trisodium citrate, preferably less than about 500 mM NaCl and 50 mM trisodium citrate, and more preferably less than about 250 mM NaCl and 25 mM trisodium citrate. Low stringency hybridization can be obtained in the absence of organic solvent, e.g., formamide, while high stringency hybridization can be obtained in the presence of at least about 35% formamide, and more preferably at least about 50% formamide. Stringent temperature conditions will ordinarily include temperatures of at least about 30° C., more preferably of at least about 37° C., and most preferably of at least about 42° C. Varying additional parameters, such as hybridization time, the concentration of detergent, e.g., sodium dodecyl sulfate (SDS), and the inclusion or exclusion of carrier DNA, are well known to those skilled in the art. Various levels of stringency are accomplished by combining these various conditions as needed. In a preferred: embodiment, hybridization will occur at 30° C. in 750 mM NaCl, 75 mM trisodium citrate, and 1% SDS. In a more preferred embodiment, hybridization will occur at 37° C. in 500 mM NaCl, 50 mM trisodium citrate, 1% SDS, 35% formamide, and 100 μg/ml denatured salmon sperm DNA (ssDNA). In a most preferred embodiment, hybridization will occur at 42° C. in 250 mM NaCl, 25 mM trisodium citrate, 1% SDS, 50% formamide, and 200 μg/ml ssDNA. Useful variations on these conditions will be readily apparent to those skilled in the art.

[0095] For most applications, washing steps that follow hybridization will also vary in stringency. Wash stringency conditions can be defined by salt concentration and by temperature. As above, wash stringency can be increased by decreasing salt concentration or by increasing temperature. For example, stringent salt concentration for the wash steps will preferably be less than about 30 mM NaCl and 3 mM trisodium citrate, and most preferably less than about 15 mM NaCl and 1.5 mM trisodium citrate. Stringent temperature conditions for the wash steps will ordinarily include a temperature of at least about 25° C., more preferably of at least about 42° C., and even more preferably of at least about 68° C. In a preferred embodiment, wash steps will occur at 25° C. in 30 mM NaCl, 3 mM trisodium citrate, and 0.1% SDS. In a more preferred embodiment, wash steps will occur at 42° C. in 15 mM NaCl, 1.5 mM trisodium citrate, and 0.1% SDS. In a more preferred embodiment, wash steps will occur at 68° C. in 15 mM NaCl, 1.5 mM trisodium citrate, and 0.1% SDS. Additional variations on these conditions will be readily apparent to those skilled in the art. Hybridization techniques are well known to those skilled in the art and are described, for example, in Benton and Davis (Science 196:180, 1977); Grunstein and Rogness (Proc. Natl. Acad. Sci., USA 72:3961, 1975); Ausubel et al. (Current Protocols in Molecular Biology, Wiley Interscience, New York, 2001); Berger and Kimmel (Guide to Molecular Cloning Techniques, 1987, Academic Press, New York); and Sambrook et al., Molecular Cloning: A Laboratory Manual, Cold Spring Harbor Laboratory Press, New York.

[0096] By “substantially identical” is meant a polypeptide or nucleic acid molecule exhibiting at least 50% identity to a reference amino acid sequence (for example, any one of the amino acid sequences described herein) or nucleic acid sequence (for example, any one of the nucleic acid sequences described herein). Preferably, such a sequence is at least 60%, more preferably 80% or 85%, and more preferably 90%, 95% or even 99% identical at the amino acid level or nucleic acid to the sequence used for comparison.

[0097] Sequence identity is typically measured using sequence analysis software (for example, Sequence Analysis Software Package of the Genetics Computer Group, University of Wisconsin Biotechnology Center, 1710 University Avenue, Madison, Wis. 53705, BLAST, BESTFIT, GAP, or PILEUP/PRETTYBOX programs). Such software matches identical or similar sequences by assigning degrees of homology to various substitutions, deletions, and/or other modifications. In an exemplary approach to determining the degree of identity, a BLAST program may be used, with a probability score between e-3 and e-100 indicating a closely related sequence.

[0098] As used herein, the term “analog” refers to a structurally related polypeptide or nucleic acid molecule having the function of a reference polypeptide or nucleic acid molecule.

[0099] As used herein, the term “ligand” refers to a molecule that binds to a receptor. In particular, the ligand binds a receptor on another cell, allowing for cell-to-cell recognition and/or interaction.

[0100] As used herein, the term “disease” refers to any condition or disorder that damages or interferes with the normal function of a cell, tissue, or organ. Examples of diseases include neoplasia or pathogen infection of cell.

[0101] As used herein, the term “effective amount” refers to an amount sufficient to have a therapeutic effect. In certain embodiments, an “effective amount” is an amount sufficient to arrest, ameliorate, or inhibit the continued proliferation, growth, or metastasis (e.g., invasion, or migration) of a neoplasia.

[0102] As used herein, the term “heterologous nucleic acid molecule or polypeptide” refers to a nucleic acid molecule (e.g., a cDNA, DNA or RNA molecule) or polypeptide that is not normally present in a cell or sample obtained from a cell. This nucleic acid may be from another organism, or it may be, for example, an mRNA molecule that is not normally expressed in a cell or sample.

[0103] As used herein, the term “immunoresponsive cell” refers to a cell that functions in an immune response or a progenitor, or progeny thereof.

[0104] As used herein, the term “modulate” refers positively or negatively alter. Exemplary modulations include an about 1%, about 2%, about 5%, about 10%, about 25%, about 50%, about 75%, or about 100% change.

[0105] As used herein, the term “increase” refers to alter positively by at least about 5%, including, but not limited to, alter positively by about 5%, by about 10%, by about 25%, by about 30%, by about 50%, by about 75%, or by about 100%.

[0106] As used herein, the term “reduce” refers to alter negatively by at least about 5% including, but not limited to, alter negatively by about 5%, by about 10%, by about 25%, by about 30%, by about 50%, by about 75%, or by about 100%.

[0107] As used herein, the term “isolated cell” refers to a cell that is separated from the molecular and/or cellular components that naturally accompany the cell.

[0108] As used herein, the term “isolated,” “purified,” or “biologically pure” refers to material that is free to varying degrees from components which normally accompany it as found in its native state. “Isolate” denotes a degree of separation from original source or surroundings. “Purify” denotes a degree of separation that is higher than isolation. A “purified” or “biologically pure” protein is sufficiently free of other materials such that any impurities do not materially affect the biological properties of the protein or cause other adverse consequences. That is, a nucleic acid or peptide of this invention is purified if it is substantially free of cellular material, viral material, or culture medium when produced by recombinant DNA techniques, or chemical precursors or other chemicals when chemically synthesized. Purity and homogeneity are typically determined using analytical chemistry techniques, for example, polyacrylamide gel electrophoresis or high performance liquid chromatography. The term “purified” can denote that a nucleic acid or protein gives rise to essentially one band in an electrophoretic gel. For a protein that can be subjected to modifications, for example, phosphorylation or glycosylation, different modifications may give rise to different isolated proteins, which can be separately purified.

[0109] As used herein, the term “secreted” is meant a polypeptide that is released from a cell via the secretory pathway through the endoplasmic reticulum, Golgi apparatus, and as a vesicle that transiently fuses at the cell plasma membrane, releasing the proteins outside of the cell.

[0110] As used herein, the term “specifically binds” or “specifically binds to” or “specifically target” is meant a polypeptide or fragment thereof that recognizes and binds a biological molecule of interest (e.g., a polypeptide), but which does not substantially recognize and bind other molecules in a sample, for example, a biological sample, which naturally includes a polypeptide of the invention.

[0111] As used herein, the term “treating” or “treatment” refers to clinical intervention in an attempt to alter the disease course of the individual or cell being treated, and can be performed either for prophylaxis or during the course of clinical pathology. Therapeutic effects of treatment include, without limitation, preventing occurrence or recurrence of disease, alleviation of symptoms, diminishment of any direct or indirect pathological consequences of the disease, preventing metastases, decreasing the rate of disease progression, amelioration or palliation of the disease state, and remission or improved prognosis. By preventing progression of a disease or disorder, a treatment can prevent deterioration due to a disorder in an affected or diagnosed subject or a subject suspected of having the disorder, but also a treatment may prevent the onset of the disorder or a symptom of the disorder in a subject at risk for the disorder or suspected of having the disorder.

[0112] As used herein, the term “subject” refers to any animal (e.g., a mammal), including, but not limited to, humans, non-human primates, rodents, and the like (e.g., which is to be the recipient of a particular treatment, or from whom cells are harvested).

### H. Fc Receptor-Like 5 (FcRL5)

[0113] Fc Receptor-Like 5 (FcRL5) (also known as “CD307e” or “IRTA2”) is a rational target for treating multiple myeloma as it is expressed on B cells and plasma cells. FcRL5 binds to the Fc portion of IgG and contributes to B cell receptor signaling and B cell proliferation (Franco et al., Journal of immunology 190, 5739-5746 (2013); Dement-Brown et al., Journal of leukocyte biology 91, 59-67 (2012). FcRL5 was found to be an alternative to CD138 as a FACS marker for malignant plasma cells from fresh or frozen patient samples with a mean relative MFI between 10-55 (n=23) (Ise et al., Leukemia 21, 169-174 (2007)). Another study confirmed cell surface expression of FcRL5 by FACS on primary patient samples from most chronic lymphocytic leukemia (CLL), and mantle cell lymphoma cases, and all multiple myeloma (MM) (n=8) cases tested (Ise et al. (2007)). A third group found high surface staining on plasma cells from normal bone marrows (n=7), in MGUS (n=16), and in MM (n=16), (MFI similar in all three groups, ˜1000 fold increase compared to isotype control) (Elkins et al., Molecular cancer therapeutics 11, 2222-2232 (2012)). FcRL5 is on 1q21 and has been found to be involved in 1q21 abnormalities in B cell malignancies (Hatzivassiliou et al., Immunity 14, 277-289 (2001)). Amplification of 1q21 is found in 48% of MM patients at diagnosis and 67% of patients at relapse, and correlates with a worse prognosis (An et al., Haematologica 99, 353-359 (2014)). An antibody-drug conjugate targeting FcRL5 was effective in treating an in vivo murine model of MM (Elkins et al. (2012)).

[0114] Non-limiting examples of human FcRL5 amino acid sequences can be found under GenBank Protein Accession Nos: AAI01070.1; XP_011508332.1; XP_011508334.1; XP_011508333.1; XP_011508332.1; and NP_001182317.1.

[0115] In certain non-limiting embodiments, FcRL5 is human FcRL5 having the amino acid sequence set forth in SEQ ID NO:899, or fragments thereof. SEQ ID NO:899 is provided below:

[SEQ ID NO: 899]
[sequence omitted]

[0116] In certain embodiments, FcRL5 comprises 9 immunoglobulin (Ig)-like domains, e.g., domain 1, domain 2, domain 3, domain 4, domain 5, domain 6, domain 7, domain 8 and domain 9 (see FIGS. 3A and 3C). In certain embodiments, domain 9 of FcRL5 comprises the amino acid sequence set forth in SEQ ID NO:900. SEQ ID NO:900 is provided below.

[SEQ ID NO: 900]
RPVLTLRAPGTHAAVGDLLELHCEALRGSPLILYRFFHEDVTLGNRSSP
SGGASLNLSLTAEHSGNYSCEADNGLGAQRSETVTLYI.

[0117] In certain embodiments, domain 9 of FcRL5 can have the amino acid sequence set forth in SEQ ID NO:963, or fragments thereof. SEQ ID NO:963 is provided below:

[SEQ ID NO: 963]
GTHAAVGDLLELHCEALRGSPLILYRFFHEDVTLGNRSSPSGGASLNLSL
TAEHSGNYSCEADNGLGAQRSETVTLYI.

[0118] In certain embodiments, domain 1 can comprise amino acids 23-100 of SEQ ID NO:899; domain 2 can comprise amino acids 105-185 of SEQ ID NO:899; domain 3 can comprise amino acids 191-273 of SEQ ID NO:899; domain 4 can comprise amino acids 287-373 of SEQ ID NO:899; domain 5 can comprise amino acids 380-466 of SEQ ID NO:899; domain 6 can comprise amino acids 490-555 of SEQ ID NO:899; domain 7 can comprise amino acids 565-638 of SEQ ID NO:899; domain 8 can comprise amino acids 658-731 of SEQ ID NO:899; and domain 9 can comprise amino acids 754-835 of SEQ ID NO:899.

[0119] In certain embodiments, domain 9 of FcRL5 comprises an amino acid sequence that is at least 80%, 81%, 82%, 83%, 84%, 85%, 86%, 87%, 88%, 89%, 90%, 91%, 92%, 93%, 94%, 95%, 96%, 97%, 98% or 99% homologous to the amino acid sequence of SEQ ID NO:900 or 963.

### III. Chimeric Antigen Receptor (CAR).

[0120] Chimeric antigen receptors (CARs) are engineered receptors, which graft or confer a specificity of interest onto an immune effector cell. CARs can be used to graft the specificity of a monoclonal antibody onto a T cell; with transfer of their coding sequence facilitated by retroviral vectors.

[0121] There are three generations of CARs. “First generation” CARs are typically composed of an extracellular antigen binding domain (e.g., a single-chain variable fragments (scFv)) fused to a transmembrane domain, fused to cytoplasmic/intracellular domain of the T cell receptor chain. “First generation” CARs typically have the intracellular domain from the CD3ζ chain, which is the primary transmitter of signals from endogenous TCRs. “First generation” CARs can provide de novo antigen recognition and cause activation of both CD4⁺ and CD8⁺ T cells through their CD3ζ chain signaling domain in a single fusion molecule, independent of HLA-mediated antigen presentation. “Second generation” CARs add intracellular domains from various co-stimulatory molecules (e.g., CD28, 4-1BB, ICOS, OX40) to the cytoplasmic tail of the CAR to provide additional signals to the T cell. “Second generation” CARs comprise those that provide both co-stimulation (e.g., CD28 or 4-1BB) and activation (CD3ζ). Preclinical studies have indicated that “Second Generation” CARs can improve the anti-tumor activity of T cells. For example, robust efficacy of “Second Generation” CAR modified T cells was demonstrated in clinical trials targeting the CD19 molecule in patients with chronic lymphoblastic leukemia (CLL) and acute lymphoblastic leukemia (ALL). “Third generation” CARs comprise those that provide multiple co-stimulation (e.g., CD28 and 4-1BB) and activation (CD3ζ).

[0122] In accordance with the presently disclosed subject matter, the CARs comprise an extracellular antigen-binding domain, a transmembrane domain and an intracellular domain, where the extracellular antigen-binding domain binds to FcRL5. In a specific non-limiting embodiment, the extracellular antigen-binding domain is a scFv. In a specific non-limiting embodiment, the extracellular antigen-binding domain is a Fab, which is optionally crosslinked. In a specific non-limiting embodiment, the extracellular binding domain is a F(ab)₂. In a specific non-limiting embodiment, any of the foregoing molecules may be comprised in a fusion protein with a heterologous sequence to form the extracellular antigen-binding domain.

[0123] In certain non-limiting embodiments, the extracellular antigen-binding domain of a CAR of the present disclosure has a high binding specificity as well as high binding affinity to FcRL5 or domain 9 of FcRL5. In certain non-limiting embodiments, the extracellular antigen-binding domain of a CAR of the present disclosure has a high binding specificity as well as high binding affinity to domain 8 of FcRL5. In certain non-limiting embodiments, the extracellular antigen-binding domain of a CAR of the present disclosure has a high binding specificity as well as high binding affinity to domain 7 of FcRL5. For example, in such embodiments, the extracellular antigen-binding domain of the CAR (embodied, for example, in an scFv or an analog thereof) binds to FcRL5 (or domain 8 or domain 9 of FcRL5) with a dissociation constant (K_{d}) of about 3×10⁻⁶ M or less. In certain embodiments, the K_{d} is about 1×10⁻⁶ M or less, about 1×10⁻⁷ M or less, about 1×10⁻⁸ M or less, about 1×10⁻⁹ M or less, about 1×10⁻¹⁰ M or less or about 1×10⁻¹¹ M or less. In certain embodiments, the K_{d} is from about 1×10⁻¹¹ M to about 3×10⁻⁶ M, 1×10⁻¹⁰ M to about 3×10⁻⁶ M or from about 1×10⁻⁹ M to about 3×10⁻⁶ M, such as from about 1×10⁻⁹ M to about 1×10⁻⁸ M, from about 1×10⁻⁸ M to about 1×10⁻⁷ M, or from about 1×10⁻⁷ M to about 1×10⁻⁶ M, or from about 1×10⁻⁶ M to about 3×10⁻⁶ M.

[0124] Binding of the extracellular antigen-binding domain (embodiment, for example, in an scFv or an analog thereof) of a presently disclosed CAR to FcRL5 (or domain 8 or domain 9 of FcRL5) can be confirmed by, for example, enzyme-linked immunosorbent assay (ELISA), radioimmunoassay (RIA), FACS analysis, bioassay (e.g., growth inhibition), or Western Blot assay. Each of these assays generally detect the presence of protein-antibody complexes of particular interest by employing a labeled reagent (e.g., an antibody, or an scFv) specific for the complex of interest. For example, the scFv can be radioactively labeled and used in a radioimmunoassay (RIA) (see, for example, Weintraub, B., Principles of Radioimmunoassays, Seventh Training Course on Radioligand Assay Techniques, The Endocrine Society, March, 1986, which is incorporated by reference herein). The radioactive isotope can be detected by such means as the use of a γ counter or a scintillation counter or by autoradiography. In certain embodiments, the FcRL5-targeted extracellular antigen-binding domain is labeled with a fluorescent marker. Non-limiting examples of fluorescent markers include green fluorescent protein (GFP), blue fluorescent protein (e.g., EBFP, EBFP2, Azurite, and mKalamal), cyan fluorescent protein (e.g., ECFP, Cerulean, and CyPet), and yellow fluorescent protein (e.g., YFP, Citrine, Venus, and YPet). In certain embodiments, the FcRL5-targeted human scFv is labeled with GFP.

[0125] In certain embodiments, the extracellular antigen-binding domain of a presently disclosed CAR comprises a single-chain variable fragment (scFv). In one specific embodiment, the extracellular antigen-binding domain of a presently disclosed CAR comprises a human scFv that specifically binds to human FcRL5. In another specific embodiment, the extracellular antigen-binding domain of a presently disclosed CAR comprises a murine scFv that specifically binds to human FcRL5. In certain embodiments, the extracellular antigen-binding domain of a presently disclosed CAR comprises a scFv that specifically binds to at least a portion of domain 7 of FcRL5. In certain embodiments, the extracellular antigen-binding domain of a presently disclosed CAR comprises a scFv that specifically binds to at least a portion of domain 8 of FcRL5. In certain embodiments, the extracellular antigen-binding domain of a presently disclosed CAR comprises a scFv that specifically binds to at least a portion of domain 9 of FcRL5. For example, and not by way of limitation, domain 9 of FcRL5 comprises the amino acid sequence set forth in SEQ ID NO:900 or 963, or fragments thereof.

[0126] In certain embodiments, the extracellular antigen-binding domain is a murine scFv obtained from two commercially available mouse hybridomas binding different extracellular epitopes on human FcRL5, which have been characterized in the Franco et al., Journal of Immunology (2013);190:5739-5746; Ise et al., Clinical cancer research: an official fournal of the American Association for Cancer Research (2005);11:87-96; and Ise et al., Clinical chemistry and laboratory medicine: CCLM/FESCC (2006);44:594-602, each of which are herein incorporated by reference in their entireties. In certain embodiments, the extracellular antigen-binding domain is a murine scFv that is derived from a heavy chain variable region and a light chain variable region of an antibody that binds to human FcRL5, e.g., antibodies F56 and F119 as disclosed in Ise et al. (2005), which is herein incorporated by reference in its entirety.

### Extracellular Antigen-Binding Domain of A CAR

[0127] In certain embodiments, the extracellular antigen-binding domain (e.g., scFv) comprises a light chain variable region comprising an amino acid sequence selected from the group consisting of SEQ ID NO:3, SEQ ID NO:7, SEQ ID NO:11, SEQ ID NO:15, SEQ ID NO:19, SEQ ID NO:23, SEQ ID NO:27, SEQ ID NO:31, SEQ ID NO:35, SEQ ID NO:39, SEQ ID NO:43, SEQ ID NO:47, SEQ ID NO:51, SEQ ID NO:55, SEQ ID NO:59, SEQ ID NO:63, SEQ ID NO:67, SEQ ID NO:71, SEQ ID NO:75, SEQ ID NO:79, SEQ ID NO:83, SEQ ID NO:87, SEQ ID NO:91, SEQ ID NO:95, SEQ ID NO:99, SEQ ID NO:103, SEQ ID NO:107, SEQ ID NO:111, SEQ ID NO:115, SEQ ID NO:119, SEQ ID NO:123, SEQ ID NO:127, SEQ ID NO:131, SEQ ID NO:135, SEQ ID NO:139, SEQ ID NO:143, SEQ ID NO:147, SEQ ID NO:151, SEQ ID NO:155, SEQ ID NO:159, SEQ ID NO:163, SEQ ID NO:167, SEQ ID NO:171, SEQ ID NO:175, SEQ ID NO:179, SEQ ID NO:183, SEQ ID NO:187, SEQ ID NO:191, SEQ ID NO:195, SEQ ID NO:199, SEQ ID NO:203, SEQ ID NO:207, SEQ ID NO:211, SEQ ID NO:215, SEQ ID NO:219, SEQ ID NO:223, SEQ ID NO:227, SEQ ID NO:231, SEQ ID NO:235, SEQ ID NO:239, SEQ ID NO:243, SEQ ID NO:247, SEQ ID NO:251, SEQ ID NO:255, SEQ ID NO:259, SEQ ID NO:263, SEQ ID NO:267, SEQ ID NO:271, SEQ ID NO:275, SEQ ID NO:279, SEQ ID NO:283, SEQ ID NO:287, SEQ ID NO:291, SEQ ID NO:295, SEQ ID NO:299, SEQ ID NO:303, SEQ ID NO:917 and SEQ ID NO:921, wherein the scFv antibody binds to an FcRL5 polypeptide.

[0128] In certain embodiments, the extracellular antigen-binding domain (e.g., scFv) comprises a heavy chain variable region comprising an amino acid sequence selected from the group consisting of SEQ ID NO:4, SEQ ID NO:8, SEQ ID NO:12, SEQ ID NO:16, SEQ ID NO:20, SEQ ID NO:24, SEQ ID NO:28, SEQ ID NO:32, SEQ ID NO:36, SEQ ID NO:40, SEQ ID NO:44, SEQ ID NO:48, SEQ ID NO:52, SEQ ID NO:56, SEQ ID NO:60, SEQ ID NO:64, SEQ ID NO:68, SEQ ID NO:72, SEQ ID NO:76, SEQ ID NO:80, SEQ ID NO:84, SEQ ID NO:88, SEQ ID NO:92, SEQ ID NO:96, SEQ ID NO:100, SEQ ID NO:104, SEQ ID NO:108, SEQ ID NO:112, SEQ ID NO:116, SEQ ID NO:120, SEQ ID NO:124, SEQ ID NO:128, SEQ ID NO:132, SEQ ID NO:136, SEQ ID NO:140, SEQ ID NO:144, SEQ ID NO:148, SEQ ID NO:152, SEQ ID NO:156, SEQ ID NO:160, SEQ ID NO:164, SEQ ID NO:168, SEQ ID NO:172, SEQ ID NO:176, SEQ ID NO:180, SEQ ID NO:184, SEQ ID NO:188, SEQ ID NO:192, SEQ ID NO:196, SEQ ID NO:200, SEQ ID NO:204, SEQ ID NO:208, SEQ ID NO:212, SEQ ID NO:216, SEQ ID NO:220, SEQ ID NO:224, SEQ ID NO:228, SEQ ID NO:232, SEQ ID NO:236, SEQ ID NO:240, SEQ ID NO:244, SEQ ID NO:248, SEQ ID NO:252, SEQ ID NO:256, SEQ ID NO:260, SEQ ID NO:264, SEQ ID NO:268, SEQ ID NO:272, SEQ ID NO:276, SEQ ID NO:280, SEQ ID NO:284, SEQ ID NO:288, SEQ ID NO:292, SEQ ID NO:296, SEQ ID NO:300, SEQ ID NO:304, SEQ ID NO:915 and SEQ ID NO:919.

[0129] In certain embodiments, the extracellular antigen-binding domain (e.g., scFv) comprises a heavy chain variable region comprising amino acids having the sequence set forth in SEQ ID NO:915 as provided below.

[SEQ ID NO: 915]
VKLQESGGGLVQPGGSRKLSCAASGFTFSIFGLHWVRQAPEKGLEWVAYI
SGDSNTIYYADTVKGRFTISRDNPKNTLFLQMTSLRSEDTAMYYCARNSY
YALDYWGQGTTVTVSS

[0130] The nucleic acid sequence encoding the amino acid sequence of SEQ ID NO:915 is set forth in SEQ ID NO:916 as provided below.

[SEQ ID NO: 916]
GTGAAGCTGCAGGAGTCTGGGGGAGGCTTAGTGCAGCCTGGAGGGTCCCG
GAAACTCTCCTGTGCAGCCTCTGGATTCACTTTCAGTATCTTTGGATTGC
ACTGGGTTCGTCAGGCTCCAGAGAAGGGGCTGGAGTGGGTCGCATACATT
AGTGGTGACAGTAATACCATCTACTATGCAGACACAGTGAAGGGCCGATT
CACCATCTCCAGAGACAATCCCAAGAACACCCTGTTCCTGCAAATGACCA
GTCTAAGGTCTGAGGACACGGCCATGTATTACTGTGCAAGAAATAGCTAC
TATGCTCTGGACTACTGGGGCCAAGGGACCACGGTCACCGTCTCCTCA

[0131] In certain embodiments, the extracellular antigen-binding domain (e.g., scFv) comprises a light chain variable region comprising amino acids having the sequence set forth in SEQ ID NO:917 as provided below.

[SEQ ID NO: 917]
DIELTQSPAIMSVSPGEKVTMTCRASSSVSSSYLHWYQQRSGASPKIWIY
STSNLASGVPARFSGSGTGTSYSLTISSVEAEDAATYYCQQYSGYPWTFG
GGTKLEI

[0132] The nucleic acid sequence encoding the amino acid sequence of SEQ ID NO:917 is set forth in SEQ ID NO:918 as provided below.

[SEQ ID NO: 918]
GACATTGAGCTCACCCAGTCTCCAGCAATCATGTCTGTATCTCCAGGTGA
AAAGGTCACCATGACCTGCAGGGCCAGCTCAAGTGTCAGTTCCAGTTACT
TGCACTGGTACCAGCAGAGGTCAGGTGCCTCCCCCAAAATCTGGATTTAT
AGCACATCCAACTTGGCTTCTGGAGTCCCTGCTCGCTTCAGTGGCAGTGG
GACTGGGACCTCTTACTCTCTCACAATCAGCAGTGTGGAGGCTGAAGATG
CTGCCACTTATTACTGCCAGCAGTACAGTGGTTACCCGTGGACGTTCGGT
GGAGGGACCAAGCTGGAGATC

[0133] In certain embodiments, the extracellular antigen-binding domain (e.g., scFv) comprises a heavy chain variable region comprising amino acids having the sequence set forth in SEQ ID NO:919 as provided below.

[SEQ ID NO: 919]
VQLQESGGGLVQPGGSRKLSCTASGFTFSSFGMHWVRQAPEKGLEWVAYI
SSGSNNIYFADTVKGRFTISRDNPKNTLFLQMTSLRSEDTAMYYCARSEY
YGSSHMDYWGQGTTVTVSS

[0134] The nucleic acid sequence encoding the amino acid sequence of SEQ ID NO:3 is set forth in SEQ ID NO:920 as provided below.

[SEQ ID NO: 920]
GTCCAACTGCAGGAGTCAGGGGGAGGCTTAGTGCAGCCTGGAGGGTCCCG
GAAACTCTCCTGTACAGCCTCTGGATTCACTTTCAGTAGCTTTGGAATGC
ACTGGGTTCGTCAGGCTCCAGAGAAGGGGCTGGAGTGGGTCGCATACATT
AGTAGTGGCAGTAATAACATCTACTTTGCGGACACAGTGAAGGGCCGATT
CACCATCTCCAGAGACAATCCCAAGAACACCCTGTTCCTGCAAATGACCA
GTCTAAGGTCTGAGGACACGGCCATGTATTACTGTGCAAGATCGGAATAC
TACGGTAGTAGCCATATGGACTACTGGGGCCAAGGGACCACGGTCACCGT
CTCCTCA

[0135] In certain embodiments, the extracellular antigen-binding domain (e.g., scFv) comprises a light chain variable region comprising amino acids having the sequence set forth in SEQ ID NO:921 as provided below.

[SEQ ID NO: 921]
DIELTQSPKFMSTSVGDRVSVTCKASQNVGTNVAWYQQKPGQSPKPLIYS
ATYRNSGVPDRFTGSGSGTDFTLTITNVQSKDLADYFCQQYNRYPYTSGG
GTKLEI

[0136] The nucleic acid sequence encoding the amino acid sequence of SEQ ID NO:921 is set forth in SEQ ID NO:922 as provided below.

[SEQ ID NO: 922]
GACATTGAGCTCACCCAGTCTCCAAAATTCATGTCCACATCAGTAGGAGA
CAGGGTCAGCGTCACCTGCAAGGCCAGTCAGAATGTGGGTACTAATGTAG
CCTGGTATCAACAGAAACCAGGACAATCTCCTAAACCACTGATTTACTCG
GCAACCTACCGGAACAGTGGAGTCCCTGATCGCTTCACAGGCAGTGGATC
TGGGACAGATTTCACTCTCACCATCACTAACGTGCAGTCTAAAGACTTGG
CAGACTATTTCTGTCAACAATATAACAGGTATCCGTACACGTCCGGAGGG
GGGACCAAGCTGGAGATC

[0137] In certain embodiments, the extracellular antigen-binding domain (e.g., scFv) comprises a heavy chain variable region comprising amino acids having the sequence set forth in SEQ ID NO:144. The nucleic acid sequence encoding the amino acid sequence of SEQ ID NO: 144 is set forth in SEQ ID NO:142.

[0138] In certain embodiments, the extracellular antigen-binding domain (e.g., scFv) comprises a light chain variable region comprising amino acids having the sequence set forth in SEQ ID NO:143. The nucleic acid sequence encoding the amino acid sequence of SEQ ID NO:143 is set forth in SEQ ID NO:141.

[0139] In certain embodiments, the extracellular antigen-binding domain (e.g., scFv) comprises a heavy chain variable region comprising amino acids having the sequence set forth in SEQ ID NO:216. The nucleic acid sequence encoding the amino acid sequence of SEQ ID NO:216 is set forth in SEQ ID NO:214.

[0140] In certain embodiments, the extracellular antigen-binding domain (e.g., scFv) comprises a light chain variable region comprising amino acids having the sequence set forth in SEQ ID NO:215. The nucleic acid sequence encoding the amino acid sequence of SEQ ID NO:215 is set forth in SEQ ID NO:213.

[0141] In certain embodiments, the extracellular antigen-binding domain (e.g., scFv) comprises a heavy chain variable region comprising amino acids having the sequence set forth in SEQ ID NO:220. The nucleic acid sequence encoding the amino acid sequence of SEQ ID NO:220 is set forth in SEQ ID NO:218.

[0142] In certain embodiments, the extracellular antigen-binding domain (e.g., scFv) comprises a light chain variable region comprising amino acids having the sequence set forth in SEQ ID NO:219. The nucleic acid sequence encoding the amino acid sequence of SEQ ID NO:219 is set forth in SEQ ID NO:217.

[0143] In certain embodiments, the extracellular antigen-binding domain (e.g., scFv) comprises a heavy chain variable region comprising amino acids having the sequence set forth in SEQ ID NO:236. The nucleic acid sequence encoding the amino acid sequence of SEQ ID NO:236 is set forth in SEQ ID NO:234.

[0144] In certain embodiments, the extracellular antigen-binding domain (e.g., scFv) comprises a light chain variable region comprising amino acids having the sequence set forth in SEQ ID NO:235. The nucleic acid sequence encoding the amino acid sequence of SEQ ID NO:235 is set forth in SEQ ID NO:232.

[0145] In certain embodiments, the extracellular antigen-binding domain (e.g., scFv) comprises a heavy chain variable region comprising amino acids having the sequence set forth in SEQ ID NO:268. The nucleic acid sequence encoding the amino acid sequence of SEQ ID NO:268 is set forth in SEQ ID NO:266.

[0146] In certain embodiments, the extracellular antigen-binding domain (e.g., scFv) comprises a light chain variable region comprising amino acids having the sequence set forth in SEQ ID NO:267. The nucleic acid sequence encoding the amino acid sequence of SEQ ID NO:267 is set forth in SEQ ID NO:265.

[0147] In certain embodiments, the extracellular antigen-binding domain (e.g., scFv) comprises a heavy chain variable region comprising amino acids having the sequence set forth in SEQ ID NO:172. The nucleic acid sequence encoding the amino acid sequence of SEQ ID NO: 172 is set forth in SEQ ID NO:170.

[0148] In certain embodiments, the extracellular antigen-binding domain (e.g., scFv) comprises a light chain variable region comprising amino acids having the sequence set forth in SEQ ID NO:171. The nucleic acid sequence encoding the amino acid sequence of SEQ ID NO: 171 is set forth in SEQ ID NO:169.

[0149] In certain embodiments, the extracellular antigen-binding domain (e.g., scFv) comprises a heavy chain variable region comprising amino acids having the sequence set forth in SEQ ID NO:116. The nucleic acid sequence encoding the amino acid sequence of SEQ ID NO:116 is set forth in SEQ ID NO:114.

[0150] In certain embodiments, the extracellular antigen-binding domain (e.g., scFv) comprises a light chain variable region comprising amino acids having the sequence set forth in SEQ ID NO:115. The nucleic acid sequence encoding the amino acid sequence of SEQ ID NO: 115 is set forth in SEQ ID NO:113.

[0151] In certain embodiments, the extracellular antigen-binding domain (e.g., scFv) comprises (a) a light chain variable region comprising an amino acid sequence selected from the group consisting of SEQ ID NO:3, SEQ ID NO:7, SEQ ID NO:11, SEQ ID NO:15, SEQ ID NO:19, SEQ ID NO:23, SEQ ID NO:27, SEQ ID NO:31, SEQ ID NO:35, SEQ ID NO:39, SEQ ID NO:43, SEQ ID NO:47, SEQ ID NO:51, SEQ ID NO:55, SEQ ID NO:59, SEQ ID NO:63, SEQ ID NO:67, SEQ ID NO:71, SEQ ID NO:75, SEQ ID NO:79, SEQ ID NO:83, SEQ ID NO:87, SEQ ID NO:91, SEQ ID NO:95, SEQ ID NO:99, SEQ ID NO:103, SEQ ID NO:107, SEQ ID NO:111, SEQ ID NO:115, SEQ ID NO:119, SEQ ID NO:123, SEQ ID NO:127, SEQ ID NO:131, SEQ ID NO:135, SEQ ID NO:139, SEQ ID NO:143, SEQ ID NO:147, SEQ ID NO:151, SEQ ID NO:155, SEQ ID NO:159, SEQ ID NO:163, SEQ ID NO:167, SEQ ID NO:171, SEQ ID NO:175, SEQ ID NO:179, SEQ ID NO:183, SEQ ID NO:187, SEQ ID NO:191, SEQ ID NO:195, SEQ ID NO:199, SEQ ID NO:203, SEQ ID NO:207, SEQ ID NO:211, SEQ ID NO:215, SEQ ID NO:219, SEQ ID NO:223, SEQ ID NO:227, SEQ ID NO:231, SEQ ID NO:235, SEQ ID NO:239, SEQ ID NO:243, SEQ ID NO:247, SEQ ID NO:251, SEQ ID NO:255, SEQ ID NO:259, SEQ ID NO:263, SEQ ID NO:267, SEQ ID NO:271, SEQ ID NO:275, SEQ ID NO:279, SEQ ID NO:283, SEQ ID NO:287, SEQ ID NO:291, SEQ ID NO:295, SEQ ID NO:299, SEQ ID NO:303, SEQ ID NO:917, SEQ ID NO:921 and (b) a heavy chain variable region comprising an amino acid sequence selected from the group consisting of SEQ ID NO:4, SEQ ID NO:8, SEQ ID NO:12, SEQ ID NO:16, SEQ ID NO:20, SEQ ID NO:24, SEQ ID NO:28, SEQ ID NO:32, SEQ ID NO:36, SEQ ID NO:40, SEQ ID NO:44, SEQ ID NO:48, SEQ ID NO:52, SEQ ID NO:56, SEQ ID NO:60, SEQ ID NO:64, SEQ ID NO:68, SEQ ID NO:72, SEQ ID NO:76, SEQ ID NO:80, SEQ ID NO:84, SEQ ID NO:88, SEQ ID NO:92, SEQ ID NO:96, SEQ ID NO:100, SEQ ID NO:104, SEQ ID NO:108, SEQ ID NO:112, SEQ ID NO:116, SEQ ID NO:120, SEQ ID NO:124, SEQ ID NO:128, SEQ ID NO:132, SEQ ID NO:136, SEQ ID NO:140, SEQ ID NO:144, SEQ ID NO:148, SEQ ID NO:152, SEQ ID NO:156, SEQ ID NO:160, SEQ ID NO:164, SEQ ID NO:168, SEQ ID NO:172, SEQ ID NO:176, SEQ ID NO:180, SEQ ID NO:184, SEQ ID NO:188, SEQ ID NO:192, SEQ ID NO:196, SEQ ID NO:200, SEQ ID NO:204, SEQ ID NO:208, SEQ ID NO:212, SEQ ID NO:216, SEQ ID NO:220, SEQ ID NO:224, SEQ ID NO:228, SEQ ID NO:232, SEQ ID NO:236, SEQ ID NO:240, SEQ ID NO:244, SEQ ID NO:248, SEQ ID NO:252, SEQ ID NO:256, SEQ ID NO:260, SEQ ID NO:264, SEQ ID NO:268, SEQ ID NO:272, SEQ ID NO:276, SEQ ID NO:280, SEQ ID NO:284, SEQ ID NO:288, SEQ ID NO:292, SEQ ID NO:296, SEQ ID NO:300, SEQ ID NO:304, SEQ ID NO:917 and SEQ ID NO:921, wherein the extracellular binding domain binds to an FcRL5 polypeptide.

[0152] In certain embodiments, the extracellular antigen-binding domain (e.g., scFv) comprises (a) a light chain variable region comprising amino acids having a sequence set forth in SEQ ID NO:3, and (b) a heavy chain variable region comprising amino acids having a sequence set forth in SEQ ID NO:4.

[0153] In certain embodiments, the extracellular antigen-binding domain (e.g., scFv) comprises (a) a light chain variable region comprising amino acids having a sequence set forth in SEQ ID NO:7, and (b) a heavy chain variable region comprising amino acids having a sequence set forth in SEQ ID NO:8.

[0154] In certain embodiments, the extracellular antigen-binding domain (e.g., scFv) comprises (a) a light chain variable region comprising amino acids having a sequence set forth in SEQ ID NO:11, and (b) a heavy chain variable region comprising amino acids having a sequence set forth in SEQ ID NO:12.

[0155] In certain embodiments, the extracellular antigen-binding domain (e.g., scFv) comprises (a) a light chain variable region comprising amino acids having a sequence set forth in SEQ ID NO:15, and (b) a heavy chain variable region comprising amino acids having a sequence set forth in SEQ ID NO:16.

[0156] In certain embodiments, the extracellular antigen-binding domain (e.g., scFv) comprises (a) a light chain variable region comprising amino acids having a sequence set forth in SEQ ID NO:19, and (b) a heavy chain variable region comprising amino acids having a sequence set forth in SEQ ID NO:20.

[0157] In certain embodiments, the extracellular antigen-binding domain (e.g., scFv) comprises (a) a light chain variable region comprising amino acids having a sequence set forth in SEQ ID NO:23, and (b) a heavy chain variable region comprising amino acids having a sequence set forth in SEQ ID NO:24.

[0158] In certain embodiments, the extracellular antigen-binding domain (e.g., scFv) comprises (a) a light chain variable region comprising amino acids having a sequence set forth in SEQ ID NO:27, and (b) a heavy chain variable region comprising amino acids having a sequence set forth in SEQ ID NO:28.

[0159] In certain embodiments, the extracellular antigen-binding domain (e.g., scFv) comprises (a) a light chain variable region comprising amino acids having a sequence set forth in SEQ ID NO:31, and (b) a heavy chain variable region comprising amino acids having a sequence set forth in SEQ ID NO:32.

[0160] In certain embodiments, the extracellular antigen-binding domain (e.g., scFv) comprises (a) a light chain variable region comprising amino acids having a sequence set forth in SEQ ID NO:35, and (b) a heavy chain variable region comprising amino acids having a sequence set forth in SEQ ID NO:36.

[0161] In certain embodiments, the extracellular antigen-binding domain (e.g., scFv) comprises (a) a light chain variable region comprising amino acids having a sequence set forth in SEQ ID NO:39, and (b) a heavy chain variable region comprising amino acids having a sequence set forth in SEQ ID NO:40.

[0162] In certain embodiments, the extracellular antigen-binding domain (e.g., scFv) comprises (a) a light chain variable region comprising amino acids having a sequence set forth in SEQ ID NO:43, and (b) a heavy chain variable region comprising amino acids having a sequence set forth in SEQ ID NO:44.

[0163] In certain embodiments, the extracellular antigen-binding domain (e.g., scFv) comprises (a) a light chain variable region comprising amino acids having a sequence set forth in SEQ ID NO:47, and (b) a heavy chain variable region comprising amino acids having a sequence set forth in SEQ ID NO:48.

[0164] In certain embodiments, the extracellular antigen-binding domain (e.g., scFv) comprises (a) a light chain variable region comprising amino acids having a sequence set forth in SEQ ID NO:51, and (b) a heavy chain variable region comprising amino acids having a sequence set forth in SEQ ID NO:52.

[0165] In certain embodiments, the extracellular antigen-binding domain (e.g., scFv) comprises (a) a light chain variable region comprising amino acids having a sequence set forth in SEQ ID NO:55, and (b) a heavy chain variable region comprising amino acids having a sequence set forth in SEQ ID NO:56.

[0166] In certain embodiments, the extracellular antigen-binding domain (e.g., scFv) comprises (a) a light chain variable region comprising amino acids having a sequence set forth in SEQ ID NO:59, and (b) a heavy chain variable region comprising amino acids having a sequence set forth in SEQ ID NO:60.

[0167] In certain embodiments, the extracellular antigen-binding domain (e.g., scFv) comprises (a) a light chain variable region comprising amino acids having a sequence set forth in SEQ ID NO:63, and (b) a heavy chain variable region comprising amino acids having a sequence set forth in SEQ ID NO:64.

[0168] In certain embodiments, the extracellular antigen-binding domain (e.g., scFv) comprises (a) a light chain variable region comprising amino acids having a sequence set forth in SEQ ID NO:67, and (b) a heavy chain variable region comprising amino acids having a sequence set forth in SEQ ID NO:68.

[0169] In certain embodiments, the extracellular antigen-binding domain (e.g., scFv) comprises (a) a light chain variable region comprising amino acids having a sequence set forth in SEQ ID NO:71, and (b) a heavy chain variable region comprising amino acids having a sequence set forth in SEQ ID NO:72.

[0170] In certain embodiments, the extracellular antigen-binding domain (e.g., scFv) comprises (a) a light chain variable region comprising amino acids having a sequence set forth in SEQ ID NO:75, and (b) a heavy chain variable region comprising amino acids having a sequence set forth in SEQ ID NO:76.

[0171] In certain embodiments, the extracellular antigen-binding domain (e.g., scFv) comprises (a) a light chain variable region comprising amino acids having a sequence set forth in SEQ ID NO:79, and (b) a heavy chain variable region comprising amino acids having a sequence set forth in SEQ ID NO:80.

[0172] In certain embodiments, the extracellular antigen-binding domain (e.g., scFv) comprises (a) a light chain variable region comprising amino acids having a sequence set forth in SEQ ID NO:83, and (b) a heavy chain variable region comprising amino acids having a sequence set forth in SEQ ID NO:84.

[0173] In certain embodiments, the extracellular antigen-binding domain (e.g., scFv) comprises (a) a light chain variable region comprising amino acids having a sequence set forth in SEQ ID NO:87, and (b) a heavy chain variable region comprising amino acids having a sequence set forth in SEQ ID NO:88.

[0174] In certain embodiments, the extracellular antigen-binding domain (e.g., scFv) comprises (a) a light chain variable region comprising amino acids having a sequence set forth in SEQ ID NO:91, and (b) a heavy chain variable region comprising amino acids having a sequence set forth in SEQ ID NO:92.

[0175] In certain embodiments, the extracellular antigen-binding domain (e.g., scFv) comprises (a) a light chain variable region comprising amino acids having a sequence set forth in SEQ ID NO:95, and (b) a heavy chain variable region comprising amino acids having a sequence set forth in SEQ ID NO:96.

[0176] In certain embodiments, the extracellular antigen-binding domain (e.g., scFv) comprises (a) a light chain variable region comprising amino acids having a sequence set forth in SEQ ID NO:99, and (b) a heavy chain variable region comprising amino acids having a sequence set forth in SEQ ID NO:100.

[0177] In certain embodiments, the extracellular antigen-binding domain (e.g., scFv) comprises (a) a light chain variable region comprising amino acids having a sequence set forth in SEQ ID NO:103, and (b) a heavy chain variable region comprising amino acids having a sequence set forth in SEQ ID NO:104.

[0178] In certain embodiments, the extracellular antigen-binding domain (e.g., scFv) comprises (a) a light chain variable region comprising amino acids having a sequence set forth in SEQ ID NO:107, and (b) a heavy chain variable region comprising amino acids having a sequence set forth in SEQ ID NO:108.

[0179] In certain embodiments, the extracellular antigen-binding domain (e.g., scFv) comprises (a) a light chain variable region comprising amino acids having a sequence set forth in SEQ ID NO:111, and (b) a heavy chain variable region comprising amino acids having a sequence set forth in SEQ ID NO:112.

[0180] In certain embodiments, the extracellular antigen-binding domain (e.g., scFv) comprises (a) a light chain variable region comprising amino acids having a sequence set forth in SEQ ID NO:115, and (b) a heavy chain variable region comprising amino acids having a sequence set forth in SEQ ID NO:116.

[0181] In certain embodiments, the extracellular antigen-binding domain (e.g., scFv) comprises (a) a light chain variable region comprising amino acids having a sequence set forth in SEQ ID NO:119, and (b) a heavy chain variable region comprising amino acids having a sequence set forth in SEQ ID NO:120.

[0182] In certain embodiments, the extracellular antigen-binding domain (e.g., scFv) comprises (a) a light chain variable region comprising amino acids having a sequence set forth in SEQ ID NO:123, and (b) a heavy chain variable region comprising amino acids having a sequence set forth in SEQ ID NO:124.

[0183] In certain embodiments, the extracellular antigen-binding domain (e.g., scFv) comprises (a) a light chain variable region comprising amino acids having a sequence set forth in SEQ ID NO:127, and (b) a heavy chain variable region comprising amino acids having a sequence set forth in SEQ ID NO:128.

[0184] In certain embodiments, the extracellular antigen-binding domain (e.g., scFv) comprises (a) a light chain variable region comprising amino acids having a sequence set forth in SEQ ID NO:131, and (b) a heavy chain variable region comprising amino acids having a sequence set forth in SEQ ID NO:132.

[0185] In certain embodiments, the extracellular antigen-binding domain (e.g., scFv) comprises (a) a light chain variable region comprising amino acids having a sequence set forth in SEQ ID NO:135, and (b) a heavy chain variable region comprising amino acids having a sequence set forth in SEQ ID NO:136.

[0186] In certain embodiments, the extracellular antigen-binding domain (e.g., scFv) comprises (a) a light chain variable region comprising amino acids having a sequence set forth in SEQ ID NO:139, and (b) a heavy chain variable region comprising amino acids having a sequence set forth in SEQ ID NO:140.

[0187] In certain embodiments, the extracellular antigen-binding domain (e.g., scFv) comprises (a) a light chain variable region comprising amino acids having a sequence set forth in SEQ ID NO:143, and (b) a heavy chain variable region comprising amino acids having a sequence set forth in SEQ ID NO:144.

[0188] In certain embodiments, the extracellular antigen-binding domain (e.g., scFv) comprises (a) a light chain variable region comprising amino acids having a sequence set forth in SEQ ID NO:147, and (b) a heavy chain variable region comprising amino acids having a sequence set forth in SEQ ID NO:148.

[0189] In certain embodiments, the extracellular antigen-binding domain (e.g., scFv) comprises (a) a light chain variable region comprising amino acids having a sequence set forth in SEQ ID NO:151, and (b) a heavy chain variable region comprising amino acids having a sequence set forth in SEQ ID NO:152.

[0190] In certain embodiments, the extracellular antigen-binding domain (e.g., scFv) comprises (a) a light chain variable region comprising amino acids having a sequence set forth in SEQ ID NO:155, and (b) a heavy chain variable region comprising amino acids having a sequence set forth in SEQ ID NO:156.

[0191] In certain embodiments, the extracellular antigen-binding domain (e.g., scFv) comprises (a) a light chain variable region comprising amino acids having a sequence set forth in SEQ ID NO:159, and (b) a heavy chain variable region comprising amino acids having a sequence set forth in SEQ ID NO:160.

[0192] In certain embodiments, the extracellular antigen-binding domain (e.g., scFv) comprises (a) a light chain variable region comprising amino acids having a sequence set forth in SEQ ID NO:163, and (b) a heavy chain variable region comprising amino acids having a sequence set forth in SEQ ID NO:164.

[0193] In certain embodiments, the extracellular antigen-binding domain (e.g., scFv) comprises (a) a light chain variable region comprising amino acids having a sequence set forth in SEQ ID NO:167, and (b) a heavy chain variable region comprising amino acids having a sequence set forth in SEQ ID NO:168.

[0194] In certain embodiments, the extracellular antigen-binding domain (e.g., scFv) comprises (a) a light chain variable region comprising amino acids having a sequence set forth in SEQ ID NO:171, and (b) a heavy chain variable region comprising amino acids having a sequence set forth in SEQ ID NO:172.

[0195] In certain embodiments, the extracellular antigen-binding domain (e.g., scFv) comprises (a) a light chain variable region comprising amino acids having a sequence set forth in SEQ ID NO:175, and (b) a heavy chain variable region comprising amino acids having a sequence set forth in SEQ ID NO:176.

[0196] In certain embodiments, the extracellular antigen-binding domain (e.g., scFv) comprises (a) a light chain variable region comprising amino acids having a sequence set forth in SEQ ID NO:179, and (b) a heavy chain variable region comprising amino acids having a sequence set forth in SEQ ID NO:180.

[0197] In certain embodiments, the extracellular antigen-binding domain (e.g., scFv) comprises (a) a light chain variable region comprising amino acids having a sequence set forth in SEQ ID NO:183, and (b) a heavy chain variable region comprising amino acids having a sequence set forth in SEQ ID NO:184.

[0198] In certain embodiments, the extracellular antigen-binding domain (e.g., scFv) comprises (a) a light chain variable region comprising amino acids having a sequence set forth in SEQ ID NO:187, and (b) a heavy chain variable region comprising amino acids having a sequence set forth in SEQ ID NO:188.

[0199] In certain embodiments, the extracellular antigen-binding domain (e.g., scFv) comprises (a) a light chain variable region comprising amino acids having a sequence set forth in SEQ ID NO:191, and (b) a heavy chain variable region comprising amino acids having a sequence set forth in SEQ ID NO:192.

[0200] In certain embodiments, the extracellular antigen-binding domain (e.g., scFv) comprises (a) a light chain variable region comprising amino acids having a sequence set forth in SEQ ID NO:195, and (b) a heavy chain variable region comprising amino acids having a sequence set forth in SEQ ID NO:196.

[0201] In certain embodiments, the extracellular antigen-binding domain (e.g., scFv) comprises (a) a light chain variable region comprising amino acids having a sequence set forth in SEQ ID NO:199, and (b) a heavy chain variable region comprising amino acids having a sequence set forth in SEQ ID NO:200.

[0202] In certain embodiments, the extracellular antigen-binding domain (e.g., scFv) comprises (a) a light chain variable region comprising amino acids having a sequence set forth in SEQ ID NO:203, and (b) a heavy chain variable region comprising amino acids having a sequence set forth in SEQ ID NO:204.

[0203] In certain embodiments, the extracellular antigen-binding domain (e.g., scFv) comprises (a) a light chain variable region comprising amino acids having a sequence set forth in SEQ ID NO:207, and (b) a heavy chain variable region comprising amino acids having a sequence set forth in SEQ ID NO:208.

[0204] In certain embodiments, the extracellular antigen-binding domain (e.g., scFv) comprises (a) a light chain variable region comprising amino acids having a sequence set forth in SEQ ID NO:211, and (b) a heavy chain variable region comprising amino acids having a sequence set forth in SEQ ID NO:212.

[0205] In certain embodiments, the extracellular antigen-binding domain (e.g., scFv) comprises (a) a light chain variable region comprising amino acids having a sequence set forth in SEQ ID NO:215, and (b) a heavy chain variable region comprising amino acids having a sequence set forth in SEQ ID NO:216.

[0206] In certain embodiments, the extracellular antigen-binding domain (e.g., scFv) comprises (a) a light chain variable region comprising amino acids having a sequence set forth in SEQ ID NO:219, and (b) a heavy chain variable region comprising amino acids having a sequence set forth in SEQ ID NO:220.

[0207] In certain embodiments, the extracellular antigen-binding domain (e.g., scFv) comprises (a) a light chain variable region comprising amino acids having a sequence set forth in SEQ ID NO:223, and (b) a heavy chain variable region comprising amino acids having a sequence set forth in SEQ ID NO:224.

[0208] In certain embodiments, the extracellular antigen-binding domain (e.g., scFv) comprises (a) a light chain variable region comprising amino acids having a sequence set forth in SEQ ID NO:227, and (b) a heavy chain variable region comprising amino acids having a sequence set forth in SEQ ID NO:228.

[0209] In certain embodiments, the extracellular antigen-binding domain (e.g., scFv) comprises (a) a light chain variable region comprising amino acids having a sequence set forth in SEQ ID NO:231, and (b) a heavy chain variable region comprising amino acids having a sequence set forth in SEQ ID NO:232.

[0210] In certain embodiments, the extracellular antigen-binding domain (e.g., scFv) comprises (a) a light chain variable region comprising amino acids having a sequence set forth in SEQ ID NO:235, and (b) a heavy chain variable region comprising amino acids having a sequence set forth in SEQ ID NO:236.

[0211] In certain embodiments, the extracellular antigen-binding domain (e.g., scFv) comprises (a) a light chain variable region comprising amino acids having a sequence set forth in SEQ ID NO:239, and (b) a heavy chain variable region comprising amino acids having a sequence set forth in SEQ ID NO:240.

[0212] In certain embodiments, the extracellular antigen-binding domain (e.g., scFv) comprises (a) a light chain variable region comprising amino acids having a sequence set forth in SEQ ID NO:243, and (b) a heavy chain variable region comprising amino acids having a sequence set forth in SEQ ID NO:244.

[0213] In certain embodiments, the extracellular antigen-binding domain (e.g., scFv) comprises (a) a light chain variable region comprising amino acids having a sequence set forth in SEQ ID NO:247, and (b) a heavy chain variable region comprising amino acids having a sequence set forth in SEQ ID NO:248.

[0214] In certain embodiments, the extracellular antigen-binding domain (e.g., scFv) comprises (a) a light chain variable region comprising amino acids having a sequence set forth in SEQ ID NO:251, and (b) a heavy chain variable region comprising amino acids having a sequence set forth in SEQ ID NO:252.

[0215] In certain embodiments, the extracellular antigen-binding domain (e.g., scFv) comprises (a) a light chain variable region comprising amino acids having a sequence set forth in SEQ ID NO:255, and (b) a heavy chain variable region comprising amino acids having a sequence set forth in SEQ ID NO:256.

[0216] In certain embodiments, the extracellular antigen-binding domain (e.g., scFv) comprises (a) a light chain variable region comprising amino acids having a sequence set forth in SEQ ID NO:259, and (b) a heavy chain variable region comprising amino acids having a sequence set forth in SEQ ID NO:260.

[0217] In certain embodiments, the extracellular antigen-binding domain (e.g., scFv) comprises (a) a light chain variable region comprising amino acids having a sequence set forth in SEQ ID NO:263, and (b) a heavy chain variable region comprising amino acids having a sequence set forth in SEQ ID NO:264.

[0218] In certain embodiments, the extracellular antigen-binding domain (e.g., scFv) comprises (a) a light chain variable region comprising amino acids having a sequence set forth in SEQ ID NO:267, and (b) a heavy chain variable region comprising amino acids having a sequence set forth in SEQ ID NO:268.

[0219] In certain embodiments, the extracellular antigen-binding domain (e.g., scFv) comprises (a) a light chain variable region comprising amino acids having a sequence set forth in SEQ ID NO:271, and (b) a heavy chain variable region comprising amino acids having a sequence set forth in SEQ ID NO:272.

[0220] In certain embodiments, the extracellular antigen-binding domain (e.g., scFv) comprises (a) a light chain variable region comprising amino acids having a sequence set forth in SEQ ID NO:275, and (b) a heavy chain variable region comprising amino acids having a sequence set forth in SEQ ID NO:276.

[0221] In certain embodiments, the extracellular antigen-binding domain (e.g., scFv) comprises (a) a light chain variable region comprising amino acids having a sequence set forth in SEQ ID NO:279, and (b) a heavy chain variable region comprising amino acids having a sequence set forth in SEQ ID NO:280.

[0222] In certain embodiments, the extracellular antigen-binding domain (e.g., scFv) comprises (a) a light chain variable region comprising amino acids having a sequence set forth in SEQ ID NO:283, and (b) a heavy chain variable region comprising amino acids having a sequence set forth in SEQ ID NO:284.

[0223] In certain embodiments, the extracellular antigen-binding domain (e.g., scFv) comprises (a) a light chain variable region comprising amino acids having a sequence set forth in SEQ ID NO:287, and (b) a heavy chain variable region comprising amino acids having a sequence set forth in SEQ ID NO:288.

[0224] In certain embodiments, the extracellular antigen-binding domain (e.g., scFv) comprises (a) a light chain variable region comprising amino acids having a sequence set forth in SEQ ID NO:291, and (b) a heavy chain variable region comprising amino acids having a sequence set forth in SEQ ID NO:292.

[0225] In certain embodiments, the extracellular antigen-binding domain (e.g., scFv) comprises (a) a light chain variable region comprising amino acids having a sequence set forth in SEQ ID NO:279, and (b) a heavy chain variable region comprising amino acids having a sequence set forth in SEQ ID NO:280.

[0226] In certain embodiments, the extracellular antigen-binding domain (e.g., scFv) comprises (a) a light chain variable region comprising amino acids having a sequence set forth in SEQ ID NO:283, and (b) a heavy chain variable region comprising amino acids having a sequence set forth in SEQ ID NO:284.

[0227] In certain embodiments, the extracellular antigen-binding domain (e.g., scFv) comprises (a) a light chain variable region comprising amino acids having a sequence set forth in SEQ ID NO:287, and (b) a heavy chain variable region comprising amino acids having a sequence set forth in SEQ ID NO:288.

[0228] In certain embodiments, the extracellular antigen-binding domain (e.g., scFv) comprises (a) a light chain variable region comprising amino acids having a sequence set forth in SEQ ID NO:291, and (b) a heavy chain variable region comprising amino acids having a sequence set forth in SEQ ID NO:292.

[0229] In certain embodiments, the extracellular antigen-binding domain (e.g., scFv) comprises (a) a light chain variable region comprising amino acids having a sequence set forth in SEQ ID NO:295, and (b) a heavy chain variable region comprising amino acids having a sequence set forth in SEQ ID NO:296.

[0230] In certain embodiments, the extracellular antigen-binding domain (e.g., scFv) comprises (a) a light chain variable region comprising amino acids having a sequence set forth in SEQ ID NO:299, and (b) a heavy chain variable region comprising amino acids having a sequence set forth in SEQ ID NO:300.

[0231] In certain embodiments, the extracellular antigen-binding domain (e.g., scFv) comprises (a) a light chain variable region comprising amino acids having a sequence set forth in SEQ ID NO:303, and (b) a heavy chain variable region comprising amino acids having a sequence set forth in SEQ ID NO:304.

[0232] In certain embodiments, the extracellular antigen-binding domain (e.g., scFv) comprises (a) a heavy chain variable region comprising amino acids having the sequence set forth in SEQ ID NO:915, and (b) a light chain variable region comprising amino acids having the sequence set forth in SEQ ID NO:917.

[0233] In certain embodiments, the extracellular antigen-binding domain (e.g., scFv) comprises (a) a heavy chain variable region comprising amino acids having the sequence set forth in SEQ ID NO:919, and (b) a light chain variable region comprising amino acids having the sequence set forth in SEQ ID NO:921.

[0234] In certain embodiments, the extracellular antigen-binding domain (e.g., scFv) comprises heavy and light chain variable regions comprising amino acid sequences that are homologous to the amino acid sequences described herein and as disclosed in Tables 1-76. For example, and not by way of limitation, the extracellular antigen-binding domain (e.g., scFv) comprises a light chain variable region comprising an amino acid sequence that is at least 80%, 81%, 82%, 83%, 84%, 85%, 86%, 87%, 88%, 89%, 90%, 91%, 92%, 93%, 94%, 95%, 96%, 97%, 98% or 99% homologous to an amino acid sequence selected from the group consisting of SEQ ID NO:3, SEQ ID NO:7, SEQ ID NO:11, SEQ ID NO:15, SEQ ID NO:19, SEQ ID NO:23, SEQ ID NO:27, SEQ ID NO:31, SEQ ID NO:35, SEQ ID NO:39, SEQ ID NO:43, SEQ ID NO:47, SEQ ID NO:51, SEQ ID NO:55, SEQ ID NO:59, SEQ ID NO:63, SEQ ID NO:67, SEQ ID NO:71, SEQ ID NO:75, SEQ ID NO:79, SEQ ID NO:83, SEQ ID NO:87, SEQ ID NO:91, SEQ ID NO:95, SEQ ID NO:99, SEQ ID NO:103, SEQ ID NO:107, SEQ ID NO:111, SEQ ID NO:115, SEQ ID NO:119, SEQ ID NO:123, SEQ ID NO:127, SEQ ID NO:131, SEQ ID NO:135, SEQ ID NO:139, SEQ ID NO:143, SEQ ID NO:147, SEQ ID NO:151, SEQ ID NO:155, SEQ ID NO:159, SEQ ID NO:163, SEQ ID NO:167, SEQ ID NO:171, SEQ ID NO:175, SEQ ID NO:179, SEQ ID NO:183, SEQ ID NO:187, SEQ ID NO:191, SEQ ID NO:195, SEQ ID NO:199, SEQ ID NO:203, SEQ ID NO:207, SEQ ID NO:211, SEQ ID NO:215, SEQ ID NO:219, SEQ ID NO:223, SEQ ID NO:227, SEQ ID NO:231, SEQ ID NO:235, SEQ ID NO:239, SEQ ID NO:243, SEQ ID NO:247, SEQ ID NO:251, SEQ ID NO:255, SEQ ID NO:259, SEQ ID NO:263, SEQ ID NO:267, SEQ ID NO:271, SEQ ID NO:275, SEQ ID NO:279, SEQ ID NO:283, SEQ ID NO:287, SEQ ID NO:291, SEQ ID NO:295, SEQ ID NO:299, SEQ ID NO:303, SEQ ID NO:917 and SEQ ID NO:921.

[0235] In certain embodiments, the extracellular antigen-binding domain (e.g., scFv) comprises a heavy chain variable region comprising an amino acid sequence that is at least 80%, 81%, 82%, 83%, 84%, 85%, 86%, 87%, 88%, 89%, 90%, 91%, 92%, 93%, 94%, 95%, 96%, 97%, 98% or 99% homologous to an amino acid sequence selected from the group consisting of SEQ ID NO:4, SEQ ID NO:8, SEQ ID NO:12, SEQ ID NO:16, SEQ ID NO:20, SEQ ID NO:24, SEQ ID NO:28, SEQ ID NO:32, SEQ ID NO:36, SEQ ID NO:40, SEQ ID NO:44, SEQ ID NO:48, SEQ ID NO:52, SEQ ID NO:56, SEQ ID NO:60, SEQ ID NO:64, SEQ ID NO:68, SEQ ID NO:72, SEQ ID NO:76, SEQ ID NO:80, SEQ ID NO:84, SEQ ID NO:88, SEQ ID NO:92, SEQ ID NO:96, SEQ ID NO:100, SEQ ID NO:104, SEQ ID NO:108, SEQ ID NO:112, SEQ ID NO:116, SEQ ID NO:120, SEQ ID NO:124, SEQ ID NO:128, SEQ ID NO:132, SEQ ID NO:136, SEQ ID NO:140, SEQ ID NO:144, SEQ ID NO:148, SEQ ID NO:152, SEQ ID NO:156, SEQ ID NO:160, SEQ ID NO:164, SEQ ID NO:168, SEQ ID NO:172, SEQ ID NO:176, SEQ ID NO:180, SEQ ID NO:184, SEQ ID NO:188, SEQ ID NO:192, SEQ ID NO:196, SEQ ID NO:200, SEQ ID NO:204, SEQ ID NO:208, SEQ ID NO:212, SEQ ID NO:216, SEQ ID NO:220, SEQ ID NO:224, SEQ ID NO:228, SEQ ID NO:232, SEQ ID NO:236, SEQ ID NO:240, SEQ ID NO:244, SEQ ID NO:248, SEQ ID NO:252, SEQ ID NO:256, SEQ ID NO:260, SEQ ID NO:264, SEQ ID NO:268, SEQ ID NO:272, SEQ ID NO:276, SEQ ID NO:280, SEQ ID NO:284, SEQ ID NO:288, SEQ ID NO:292, SEQ ID NO:296, SEQ ID NO:300, SEQ ID NO:304, SEQ ID NO:915 and SEQ ID NO:919.

[0236] In certain embodiments, the extracellular antigen-binding domain (e.g., scFv) comprises (a) a light chain variable region comprising an amino acid sequence that is at least 80%, 81%, 82%, 83%, 84%, 85%, 86%, 87%, 88%, 89%, 90%, 91%, 92%, 93%, 94%, 95%, 96%, 97%, 98% or 99% homologous to an amino acid sequence selected from the group consisting of SEQ ID NO:3, SEQ ID NO:7, SEQ ID NO:11, SEQ ID NO:15, SEQ ID NO:19, SEQ ID NO:23, SEQ ID NO:27, SEQ ID NO:31, SEQ ID NO:35, SEQ ID NO:39, SEQ ID NO:43, SEQ ID NO:47, SEQ ID NO:51, SEQ ID NO:55, SEQ ID NO:59, SEQ ID NO:63, SEQ ID NO:67, SEQ ID NO:71, SEQ ID NO:75, SEQ ID NO:79, SEQ ID NO:83, SEQ ID NO:87, SEQ ID NO:91, SEQ ID NO:95, SEQ ID NO:99, SEQ ID NO:103, SEQ ID NO:107, SEQ ID NO:111, SEQ ID NO:115, SEQ ID NO:119, SEQ ID NO:123, SEQ ID NO:127, SEQ ID NO:131, SEQ ID NO:135, SEQ ID NO:139, SEQ ID NO:143, SEQ ID NO:147, SEQ ID NO:151, SEQ ID NO:155, SEQ ID NO:159, SEQ ID NO:163, SEQ ID NO:167, SEQ ID NO:171, SEQ ID NO:175, SEQ ID NO:179, SEQ ID NO:183, SEQ ID NO:187, SEQ ID NO:191, SEQ ID NO:195, SEQ ID NO:199, SEQ ID NO:203, SEQ ID NO:207, SEQ ID NO:211, SEQ ID NO:215, SEQ ID NO:219, SEQ ID NO:223, SEQ ID NO:227, SEQ ID NO:231, SEQ ID NO:235, SEQ ID NO:239, SEQ ID NO:243, SEQ ID NO:247, SEQ ID NO:251, SEQ ID NO:255, SEQ ID NO:259, SEQ ID NO:263, SEQ ID NO:267, SEQ ID NO:271, SEQ ID NO:275, SEQ ID NO:279, SEQ ID NO:283, SEQ ID NO:287, SEQ ID NO:291, SEQ ID NO:295, SEQ ID NO:299, SEQ ID NO:303, SEQ ID NO:917 and SEQ ID NO:921; and (b) a heavy chain variable region comprising an amino acid sequence that is at least 80%, 81%, 82%, 83%, 84%, 85%, 86%, 87%, 88%, 89%, 90%, 91%, 92%, 93%, 94%, 95%, 96%, 97%, 98% or 99% homologous to an amino acid sequence selected from the group consisting of SEQ ID NO:4, SEQ ID NO:8, SEQ ID NO:12, SEQ ID NO:16, SEQ ID NO:20, SEQ ID NO:24, SEQ ID NO:28, SEQ ID NO:32, SEQ ID NO:36, SEQ ID NO:40, SEQ ID NO:44, SEQ ID NO:48, SEQ ID NO:52, SEQ ID NO:56, SEQ ID NO:60, SEQ ID NO:64, SEQ ID NO:68, SEQ ID NO:72, SEQ ID NO:76, SEQ ID NO:80, SEQ ID NO:84, SEQ ID NO:88, SEQ ID NO:92, SEQ ID NO:96, SEQ ID NO:100, SEQ ID NO:104, SEQ ID NO:108, SEQ ID NO:112, SEQ ID NO:116, SEQ ID NO:120, SEQ ID NO:124, SEQ ID NO:128, SEQ ID NO:132, SEQ ID NO:136, SEQ ID NO:140, SEQ ID NO:144, SEQ ID NO:148, SEQ ID NO:152, SEQ ID NO:156, SEQ ID NO:160, SEQ ID NO:164, SEQ ID NO:168, SEQ ID NO:172, SEQ ID NO:176, SEQ ID NO:180, SEQ ID NO:184, SEQ ID NO:188, SEQ ID NO:192, SEQ ID NO:196, SEQ ID NO:200, SEQ ID NO:204, SEQ ID NO:208, SEQ ID NO:212, SEQ ID NO:216, SEQ ID NO:220, SEQ ID NO:224, SEQ ID NO:228, SEQ ID NO:232, SEQ ID NO:236, SEQ ID NO:240, SEQ ID NO:244, SEQ ID NO:248, SEQ ID NO:252, SEQ ID NO:256, SEQ ID NO:260, SEQ ID NO:264, SEQ ID NO:268, SEQ ID NO:272, SEQ ID NO:276, SEQ ID NO:280, SEQ ID NO:284, SEQ ID NO:288, SEQ ID NO:292, SEQ ID NO:296, SEQ ID NO:300, SEQ ID NO:304, SEQ ID NO:915 and SEQ ID NO:919.

[0237] In certain embodiments, the extracellular antigen-binding domain (e.g., scFv) comprises (a) a light chain variable region comprising an amino acid sequence that is at least 80%, 81%, 82%, 83%, 84%, 85%, 86%, 87%, 88%, 89%, 90%, 91%, 92%, 93%, 94%, 95%, 96%, 97%, 98% or 99% homologous to the amino acid sequence set forth in SEQ ID NO:143, and (b) a heavy chain variable region comprising an amino acid sequence that is at least 80%, 81%, 82%, 83%, 84%, 85%, 86%, 87%, 88%, 89%, 90%, 91%, 92%, 93%, 94%, 95%, 96%, 97%, 98% or 99% homologous to the amino acid sequence set forth in SEQ ID NO:144, wherein the extracellular antigen-binding domain binds to an FcRL5 polypeptide.

[0238] In certain embodiments, the extracellular antigen-binding domain (e.g., scFv) comprises (a) a light chain variable region comprising an amino acid sequence that is at least 80%, 81%, 82%, 83%, 84%, 85%, 86%, 87%, 88%, 89%, 90%, 91%, 92%, 93%, 94%, 95%, 96%, 97%, 98% or 99% homologous to the amino acid sequence set forth in SEQ ID NO:215, and (b) a heavy chain variable region comprising an amino acid sequence that is at least 80%, 81%, 82%, 83%, 84%, 85%, 86%, 87%, 88%, 89%, 90%, 91%, 92%, 93%, 94%, 95%, 96%, 97%, 98% or 99% homologous to the amino acid sequence set forth in SEQ ID NO:216, wherein the extracellular antigen-binding domain binds to an FcRL5 polypeptide.

[0239] In certain embodiments, the extracellular antigen-binding domain (e.g., scFv) comprises (a) a light chain variable region comprising an amino acid sequence that is at least 80%, 81%, 82%, 83%, 84%, 85%, 86%, 87%, 88%, 89%, 90%, 91%, 92%, 93%, 94%, 95%, 96%, 97%, 98% or 99% homologous to the amino acid sequence set forth in SEQ ID NO:219, and (b) a heavy chain variable comprising an amino acid sequence that is at least 80%, 81%, 82%, 83%, 84%, 85%, 86%, 87%, 88%, 89%, 90%, 91%, 92%, 93%, 94%, 95%, 96%, 97%, 98% or 99% homologous to the amino acid sequence set forth in SEQ ID NO:220, wherein the extracellular antigen-binding domain binds to an FcRL5 polypeptide.

[0240] In certain embodiments, the extracellular antigen-binding domain (e.g., scFv) comprises (a) a light chain variable comprising an amino acid sequence that is at least 80%, 81%, 82%, 83%, 84%, 85%, 86%, 87%, 88%, 89%, 90%, 91%, 92%, 93%, 94%, 95%, 96%, 97%, 98% or 99% homologous to the amino acid sequence set forth in SEQ ID NO:235, and (b) a heavy chain variable region comprising an amino acid sequence that is at least 80%, 81%, 82%, 83%, 84%, 85%, 86%, 87%, 88%, 89%, 90%, 91%, 92%, 93%, 94%, 95%, 96%, 97%, 98% or 99% homologous to the amino acid sequence set forth in SEQ ID NO:236, wherein the extracellular antigen-binding domain binds to an FcRL5 polypeptide.

[0241] In certain embodiments, the extracellular antigen-binding domain (e.g., scFv) comprises (a) a light chain variable region comprising an amino acid sequence that is at least 80%, 81%, 82%, 83%, 84%, 85%, 86%, 87%, 88%, 89%, 90%, 91%, 92%, 93%, 94%, 95%, 96%, 97%, 98% or 99% homologous to the amino acid sequence set forth in SEQ ID NO:267, and (b) a heavy chain variable region comprising an amino acid sequence that is at least 80%, 81%, 82%, 83%, 84%, 85%, 86%, 87%, 88%, 89%, 90%, 91%, 92%, 93%, 94%, 95%, 96%, 97%, 98% or 99% homologous to the amino acid sequence set forth in SEQ ID NO:268, wherein the extracellular antigen-binding domain binds to an FcRL5 polypeptide.

[0242] In certain embodiments, the extracellular antigen-binding domain (e.g., scFv) comprises (a) a heavy chain variable region comprising an amino acid sequence that is at least 80%, 81%, 82%, 83%, 84%, 85%, 86%, 87%, 88%, 89%, 90%, 91%, 92%, 93%, 94%, 95%, 96%, 97%, 98% or 99% homologous to the amino acid sequence set forth in SEQ ID NO:915, and (b) a light chain variable region comprising an amino acid sequence that is at least 80%, 81%, 82%, 83%, 84%, 85%, 86%, 87%, 88%, 89%, 90%, 91%, 92%, 93%, 94%, 95%, 96%, 97%, 98% or 99% homologous to the amino acid sequence set forth in SEQ ID NO:917, wherein the extracellular antigen-binding domain binds to an FcRL5 polypeptide.

[0243] In certain embodiments, the extracellular antigen-binding domain (e.g., scFv) comprises (a) a heavy chain variable region comprising an amino acid sequence that is at least 80%, 81%, 82%, 83%, 84%, 85%, 86%, 87%, 88%, 89%, 90%, 91%, 92%, 93%, 94%, 95%, 96%, 97%, 98% or 99% homologous to the amino acid sequence set forth in SEQ ID NO:919, and (b) a light chain variable region comprising an amino acid sequence that is at least 80%, 81%, 82%, 83%, 84%, 85%, 86%, 87%, 88%, 89%, 90%, 91%, 92%, 93%, 94%, 95%, 96%, 97%, 98% or 99% homologous to the amino acid sequence set forth in SEQ ID NO:921, wherein the extracellular antigen-binding domain binds to an FcRL5 polypeptide.

[0244] In certain embodiments, the extracellular antigen-binding domain (e.g., scFv) comprises (a) a light chain variable comprising an amino acid sequence that is at least 80%, 81%, 82%, 83%, 84%, 85%, 86%, 87%, 88%, 89%, 90%, 91%, 92%, 93%, 94%, 95%, 96%, 97%, 98% or 99% homologous to the amino acid sequence set forth in SEQ ID NO:115, and (b) a heavy chain variable region comprising an amino acid sequence that is at least 80%, 81%, 82%, 83%, 84%, 85%, 86%, 87%, 88%, 89%, 90%, 91%, 92%, 93%, 94%, 95%, 96%, 97%, 98% or 99% homologous to the amino acid sequence set forth in SEQ ID NO:116, wherein the extracellular antigen-binding domain binds to an FcRL5 polypeptide.

[0245] In certain embodiments, the extracellular antigen-binding domain (e.g., scFv) comprises (a) a light chain variable comprising an amino acid sequence that is at least 80%, 81%, 82%, 83%, 84%, 85%, 86%, 87%, 88%, 89%, 90%, 91%, 92%, 93%, 94%, 95%, 96%, 97%, 98% or 99% homologous to the amino acid sequence set forth in SEQ ID NO:171, and (b) a heavy chain variable region comprising an amino acid sequence that is at least 80%, 81%, 82%, 83%, 84%, 85%, 86%, 87%, 88%, 89%, 90%, 91%, 92%, 93%, 94%, 95%, 96%, 97%, 98% or 99% homologous to the amino acid sequence set forth in SEQ ID NO:172, wherein the extracellular antigen-binding domain binds to an FcRL5 polypeptide.

[0246] An extracellular antigen-binding domain (e.g., scFv) comprising V_{H} and/or V_{L} regions having high (i.e., 80% or greater) homology to the V_{H} and V_{L} regions of the sequences set forth above, can be obtained by mutagenesis (e.g., site-directed or PCR-mediated mutagenesis), followed by testing of the encoded altered scFv for retained function (i.e., the binding affinity) using the binding assays described herein. In certain embodiments, a V_{L} sequence having at least 90%, 91%, 92%, 93%, 94%, 95%, 96%, 97%, 98% or 99% identity contains substitutions (e.g., conservative substitutions to generate conservative modifications of a sequence), insertions or deletions relative to the reference sequence, but an extracellular antigen-binding domain (e.g., scFv) comprising that sequence retains the ability to bind to FcRL5. In certain embodiments, a V_{H} sequence having at least 90%, 91%, 92%, 93%, 94%, 95%, 96%, 97%, 98%, or 99% identity contains substitutions (e.g., conservative substitutions), insertions or deletions relative to the reference sequence, but an extracellular antigen-binding domain (e.g., scFv) comprising that sequence retains the ability to bind to FcRL5. In certain embodiments, a total of about 1 to about 10 amino acids have been substituted, inserted and/or deleted in the disclosed sequences. For example, and not by way of limitation, a V_{H} sequence or a V_{L} sequence, can have up to about one, up to about two, up to about three, up to about four, up to about five, up to about six, up to about seven, up to about eight, up to about nine or up to about ten amino acid residues that are modified and/or substituted. Non-limiting examples of conservative modifications are provided below, e.g., within Table 231.

[0247] The presently disclosed subject matter further provides extracellular antigen-binding domains (e.g., scFv) that comprise heavy chain variable region and light chain variable region CDRs, e.g., CDR1s, CDR2s and CDR3s, as disclosed herein in Tables 229 and 230. The CDR regions are delineated using the Kabat system (Kabat, E. A., et al. (1991) Sequences of Proteins of Immunological Interest, Fifth Edition, U.S. Department of Health and Human Services, NIH Publication No. 91-3242). The present disclosure further provides extracellular antigen-binding domains (e.g., scFv) that comprise conservative modifications of the antibody sequences disclosed herein. For example, and not by way of limitation, an extracellular antigen-binding domains (e.g., scFv) of the presently disclosed subject matter comprises a heavy chain variable region comprising CDR1, CDR2 and CDR3 sequences and a light chain variable region comprising CDR1, CDR2 and CDR3 sequences, wherein one or more of these CDR sequences comprise specified amino acid sequences disclosed herein, or conservative modifications thereof, and wherein the extracellular antigen-binding domains retain the desired functional properties. See Tables 229 and 230.

[0248] In certain embodiments, the presently disclosed subject matter provides an extracellular antigen-binding domain (e.g., scFv) comprising a light chain variable region, wherein the light chain variable region comprises: (a) a CDR1 comprising an amino acid sequence selected from the group consisting of SEQ ID NOs: 312, 3118, 324, 329, 338, 343, 348, 352, 357, 363, 369, 381, 390, 397, 401, 406, 416, 423, 428, 433, 447, 460, 468, 474, 477, 483, 490, 498, 503, 508, 518, 533, 540, 544, 547, 556, 562, 568, 571, 580, 585, 588, 926 and 932, and conservative modifications thereof; (b) a CDR2 comprising an amino acid sequence selected from the group consisting of SEQ ID NOs:313, 319, 330, 344, 349, 358, 364, 370, 382, 385, 391, 398, 409, 417, 429, 434, 438, 448, 454, 461, 469, 478, 484, 487, 504, 513, 523, 534, 429, 448, 548, 557, 563, 572, 575, 586, 927 and 933, and conservative modifications thereof; and (c) a CDR3 comprising an amino acid sequence selected from the group consisting of SEQ ID NOs: 314, 320, 325, 331, 339, 345, 350, 353, 359, 365, 371, 377, 383, 386, 392, 395, 399, 402, 407, 410, 414, 418, 419, 424, 430, 435, 439, 443, 449, 452, 455, 457, 462, 465, 470, 479, 485, 488, 491, 493, 495, 499, 505, 509, 514, 519, 524, 528, 530, 531, 535, 541, 542, 545, 549, 554, 558, 564, 569, 573, 576, 581, 592, 928 and 934, and conservative modifications thereof. In certain embodiments, the extracellular antigen-binding domain (e.g., scFv) comprises a heavy chain variable region, wherein the heavy chain variable region comprises: (a) a CDR1 comprising an amino acid sequence selected from the group consisting of SEQ ID NOs: 309, 315, 321, 326, 332, 335, 340, 346, 354, 360, 366, 372, 378, 387, 393, 403, 411, 420, 425, 436, 440, 444, 471, 480, 500, 510, 515, 520, 525, 537, 551, 559, 565, 582, 589, 923 and 929 and conservative modifications thereof; (b) a CDR2 comprising an amino acid sequence selected from the group consisting of SEQ ID NOs: 310, 316, 322, 327, 333, 336, 341, 355, 361, 367, 373, 379, 388, 404, 412, 421, 426, 431, 441, 445, 450, 466, 472, 475, 481, 496, 501, 506, 511, 516, 521, 526, 538, 552, 560, 566, 583, 590, 924 and 930 and conservative modifications thereof; and (c) a CDR3 comprising an amino acid sequence selected from the group consisting of SEQ ID NOs: 311, 317, 323, 328, 334, 337, 342, 347, 351, 356, 362, 368, 374, 376, 380, 384, 389, 394, 396, 400, 405, 408, 412, 415, 422, 427, 432, 437, 442, 446, 451, 453, 456, 458, 459, 463, 464, 467, 473, 476, 482, 486, 489, 492, 494, 497, 502, 507, 512, 517, 522, 527, 529, 532, 536, 539, 543, 546, 550, 553, 555, 561, 567, 570, 574, 577, 578, 579, 584, 578, 587, 591, 925 and 931, and conservative modifications thereof.

[0249] In certain embodiments, the extracellular antigen-binding domain (e.g., scFv) comprises (a) a heavy chain variable region CDR1 comprising the amino acid sequence of SEQ ID NO:411 or conservative modifications thereof; (b) a heavy chain variable region CDR2 comprising the amino acid sequence of SEQ ID NO:412 or conservative modifications thereof; and (c) a heavy chain variable region CDR3 comprising the amino acid sequence of SEQ ID NO:463 or conservative modifications thereof. In certain embodiments, the extracellular antigen-binding domain (e.g., scFv) comprises (a) a light chain variable region CDR1 comprising the amino acid sequence of SEQ ID NO:318 or conservative modifications thereof; (b) a light chain variable region CDR2 comprising the amino acid sequence of SEQ ID NO:319 or conservative modifications thereof; and (c) a light chain variable region CDR3 comprising the amino acid sequence of SEQ ID NO:419 or conservative modifications thereof.

[0250] In certain embodiments, the extracellular antigen-binding domain (e.g., scFv) comprises (a) a heavy chain variable region CDR1 comprising the amino acid sequence of SEQ ID NO:515 or conservative modifications thereof; (b) a heavy chain variable region CDR2 comprising the amino acid sequence of SEQ ID NO:516 or conservative modifications thereof; and (c) a heavy chain variable region CDR3 comprising the amino acid sequence of SEQ ID NO:517 or conservative modifications thereof. In certain embodiments, the extracellular antigen-binding domain (e.g., scFv) comprises (a) a light chain variable region CDR1 comprising the amino acid sequence of SEQ ID NO:318 or conservative modifications thereof; (b) a light chain variable region CDR2 comprising the amino acid sequence of SEQ ID NO:319 or conservative modifications thereof; and (c) a light chain variable region CDR3 comprising the amino acid sequence of SEQ ID NO:531 or conservative modifications thereof.

[0251] In certain embodiments, the extracellular antigen-binding domain (e.g., scFv) comprises (a) a heavy chain variable region CDR1 comprising the amino acid sequence of SEQ ID NO:403 or conservative modifications thereof; (b) a heavy chain variable region CDR2 comprising the amino acid sequence of SEQ ID NO:404 or conservative modifications thereof; and (c) a heavy chain variable region CDR3 comprising the amino acid sequence of SEQ ID NO:532 or conservative modifications thereof. In certain embodiments, the extracellular antigen-binding domain (e.g., scFv) comprises (a) a light chain variable region CDR1 comprising the amino acid sequence of SEQ ID NO:533 or conservative modifications thereof; (b) a light chain variable region CDR2 comprising the amino acid sequence of SEQ ID NO:534 or conservative modifications thereof; and (c) a light chain variable region CDR3 comprising the amino acid sequence of SEQ ID NO:535 or conservative modifications thereof.

[0252] In certain embodiments, the extracellular antigen-binding domain (e.g., scFv) comprises (a) a heavy chain variable region CDR1 comprising the amino acid sequence of SEQ ID NO:411 or conservative modifications thereof; (b) a heavy chain variable region CDR2 comprising the amino acid sequence of SEQ ID NO:412 or conservative modifications thereof; and (c) a heavy chain variable region CDR3 comprising the amino acid sequence of SEQ ID NO:543 or conservative modifications thereof. In certain embodiments, the extracellular antigen-binding domain (e.g., scFv) comprises (a) a light chain variable region CDR1 comprising the amino acid sequence of SEQ ID NO:544 or conservative modifications thereof; (b) a light chain variable region CDR2 comprising the amino acid sequence of SEQ ID NO:448 or conservative modifications thereof; and (c) a light chain variable region CDR3 comprising the amino acid sequence of SEQ ID NO:545 or conservative modifications thereof.

[0253] In certain embodiments, the extracellular antigen-binding domain (e.g., scFv) comprises (a) a heavy chain variable region CDR1 comprising the amino acid sequence of SEQ ID NO:372 or conservative modifications thereof; (b) a heavy chain variable region CDR2 comprising the amino acid sequence of SEQ ID NO:475 or conservative modifications thereof; and (c) a heavy chain variable region CDR3 comprising the amino acid sequence of SEQ ID NO:570 or conservative modifications thereof. In certain embodiments, the extracellular antigen-binding domain (e.g., scFv) comprises (a) a light chain variable region CDR1 comprising the amino acid sequence of SEQ ID NO:571 or conservative modifications thereof; (b) a light chain variable region CDR2 comprising the amino acid sequence of SEQ ID NO:572 or conservative modifications thereof; and (c) a light chain variable region CDR3 comprising the amino acid sequence of SEQ ID NO:573 or conservative modifications thereof.

[0254] In certain embodiments, the extracellular antigen-binding domain (e.g., scFv) comprises (a) a heavy chain variable region CDR1 comprising the amino acid sequence of SEQ ID NO:440 or conservative modifications thereof; (b) a heavy chain variable region CDR2 comprising the amino acid sequence of SEQ ID NO:441 or conservative modifications thereof; and (c) a heavy chain variable region CDR3 comprising the amino acid sequence of SEQ ID NO:442 or conservative modifications thereof. In certain embodiments, the extracellular antigen-binding domain (e.g., scFv) comprises (a) a light chain variable region CDR1 comprising the amino acid sequence of SEQ ID NO:329 or conservative modifications thereof; (b) a light chain variable region CDR2 comprising the amino acid sequence of SEQ ID NO:330 or conservative modifications thereof; and (c) a light chain variable region CDR3 comprising the amino acid sequence of SEQ ID NO:443 or conservative modifications thereof.

[0255] In certain embodiments, the extracellular antigen-binding domain (e.g., scFv) comprises (a) a heavy chain variable region CDR1 comprising the amino acid sequence of SEQ ID NO:309 or conservative modifications thereof; (b) a heavy chain variable region CDR2 comprising the amino acid sequence of SEQ ID NO:310 or conservative modifications thereof; and (c) a heavy chain variable region CDR3 comprising the amino acid sequence of SEQ ID NO:489 or conservative modifications thereof. In certain embodiments, the extracellular antigen-binding domain (e.g., scFv) comprises (a) a light chain variable region CDR1 comprising the amino acid sequence of SEQ ID NO:490 or conservative modifications thereof; (b) a light chain variable region CDR2 comprising the amino acid sequence of SEQ ID NO:313 or conservative modifications thereof; and (c) a light chain variable region CDR3 comprising the amino acid sequence of SEQ ID NO:491 or conservative modifications thereof.

[0256] In certain embodiments, the extracellular antigen-binding domain (e.g., scFv) comprises (a) a heavy chain variable region CDR1 comprising amino acids having the sequence set forth in SEQ ID NO:923 or conservative modifications thereof; (b) a heavy chain variable region CDR2 comprising amino acids having the sequence set forth in SEQ ID NO:924 or conservative modifications thereof; and (c) a heavy chain variable region CDR3 comprising amino acids having the sequence set forth in SEQ ID NO:925 or conservative modifications thereof. In certain embodiments, the extracellular antigen-binding domain comprises (a) a light chain variable region CDR1 comprising amino acids having the sequence set forth in SEQ ID NO:926 or conservative modifications thereof; (b) a light chain variable region CDR2 comprising amino acids having the sequence set forth in SEQ ID NO:927 or conservative modifications thereof; and (c) a light chain variable region CDR3 comprising amino acids having the sequence set forth in SEQ ID NO:928 or conservative modifications thereof.

[0257] In certain embodiments, the extracellular antigen-binding domain (e.g., scFv) comprises (a) a heavy chain variable region CDR1 comprising amino acids having the sequence set forth in SEQ ID NO:929 or conservative modifications thereof; (b) a heavy chain variable region CDR2 comprising amino acids having the sequence set forth in SEQ ID NO:930 or conservative modifications thereof; and (c) a heavy chain variable region CDR3 comprising amino acids having the sequence set forth in SEQ ID NO:931 or conservative modifications thereof. In certain embodiments, the extracellular antigen-binding domain comprises (a) a light chain variable region CDR1 comprising amino acids having the sequence set forth in SEQ ID NO:932 or conservative modifications thereof; (b) a light chain variable region CDR2 comprising amino acids having the sequence set forth in SEQ ID NO: 933 or conservative modifications thereof; and (c) a light chain variable region CDR3 comprising amino acids having the sequence set forth in SEQ ID NO:934 or conservative modifications thereof. The presently disclosed subject matter provides an extracellular antigen-binding domain (e.g., scFv) comprising a heavy chain variable region comprising CDR1, CDR2, and CDR3 sequences and a light chain variable region comprising CDR1, CDR2, and CDR3 sequences, wherein: (a) the heavy chain variable region CDR3 comprises an amino acid sequence selected from the group consisting of SEQ ID NOs: 311, 317, 323, 328, 334, 337, 342, 347, 351, 356, 362, 368, 374, 376, 380, 384, 389, 394, 396, 400, 405, 408, 412, 415, 422, 427, 432, 437, 442, 446, 451, 453, 456, 458, 459, 463, 464, 467, 473, 476, 482, 486, 489, 492, 494, 497, 502, 507, 512, 517, 522, 527, 529, 532, 536, 539, 543, 546, 550, 553, 555, 561, 567, 570, 574, 577, 578, 579, 584, 578, 587, 591, 925 and 931, and conservative modifications thereof; and (b) the light chain variable region CDR3 comprises an amino acid sequence selected from the group consisting of SEQ ID NOs: 314, 320, 325, 331, 339, 345, 350, 353, 359, 365, 371, 377, 383, 386, 392, 395, 399, 402, 407, 410, 414, 418, 419, 424, 430, 435, 439, 443, 449, 452, 455, 457, 462, 465, 470, 479, 485, 488, 491, 493, 495, 499, 505, 509, 514, 519, 524, 528, 530, 531, 535, 541, 542, 545, 549, 554, 558, 564, 569, 573, 576, 581, 592, 928 and 934 and conservative modifications thereof; wherein the extracellular antigen-binding domain specifically binds to human FcRL5.

[0258] In certain embodiments, the extracellular antigen-binding domain (e.g., scFv) comprises (a) a heavy chain variable region CDR3 comprising the amino acid sequence of SEQ ID NO:463 or conservative modifications thereof; and (b) a light chain variable region CDR3 comprising the amino acid sequence of SEQ ID NO:419 or conservative modifications thereof; wherein the extracellular antigen-binding domain specifically binds FcRL5.

[0259] In certain embodiments, the extracellular antigen-binding domain (e.g., scFv) comprises (a) a heavy chain variable region CDR3 comprising the amino acid sequence of SEQ ID NO:517 or conservative modifications thereof; and (b) a light chain variable region CDR3 comprising the amino acid sequence of SEQ ID NO:531 or conservative modifications thereof; wherein the extracellular antigen-binding domain specifically binds FcRL5.

[0260] In certain embodiments, the extracellular antigen-binding domain (e.g., scFv) comprises (a) a heavy chain variable region CDR3 comprising the amino acid sequence of SEQ ID NO:532 or conservative modifications thereof; and (b) a light chain variable region CDR3 comprising the amino acid sequence of SEQ ID NO:535 or conservative modifications thereof; wherein the antibody or antigen-binding fragment thereof specifically binds FcRL5.

[0261] In certain embodiments, the extracellular antigen-binding domain (e.g., scFv) comprises (a) a heavy chain variable region CDR3 comprising the amino acid sequence of SEQ ID NO:543 or conservative modifications thereof; and (b) a light chain variable region CDR3 comprising the amino acid sequence of SEQ ID NO:545 or conservative modifications thereof; wherein the extracellular antigen-binding domain specifically binds FcRL5.

[0262] In certain embodiments, the extracellular antigen-binding domain (e.g., scFv) comprises (a) a heavy chain variable region CDR3 comprising the amino acid sequence of SEQ ID NO:570 or conservative modifications thereof; and (b) a light chain variable region CDR3 comprising the amino acid sequence of SEQ ID NO:573 or conservative modifications thereof; wherein the antibody or antigen-binding fragment thereof specifically binds FcRL5.

[0263] In certain embodiments, the extracellular antigen-binding domain (e.g., scFv) comprises (a) a heavy chain variable region CDR3 comprising amino acids having the sequence set forth in SEQ ID NO:925 or conservative modifications thereof; and (b) and a light chain variable region CDR3 comprising amino acids having the sequence set forth in SEQ ID NO:928 or conservative modifications thereof; wherein the extracellular antigen-binding domain specifically binds FcRL5. In certain embodiments, the extracellular antigen-binding domain (e.g., scFv) comprises (a) a heavy chain variable region CDR3 comprising amino acids having the sequence set forth in SEQ ID NO:931 or conservative modifications thereof; and (b) a light chain variable region CDR3 comprising amino acids having the sequence set forth in SEQ ID NO:934 or conservative modifications thereof. In certain embodiments, the extracellular antigen-binding domain (e.g., scFv) comprises (a) a heavy chain variable region CDR3 comprising the amino acid sequence of SEQ ID NO:442 or conservative modifications thereof; and (b) a light chain variable region CDR3 comprising the amino acid sequence of SEQ ID NO:443 or conservative modifications thereof; wherein the extracellular antigen-binding domain specifically binds FcRL5.

[0264] In certain embodiments, the extracellular antigen-binding domain (e.g., scFv) comprises (a) a heavy chain variable region CDR3 comprising the amino acid sequence of SEQ ID NO:489 or conservative modifications thereof; and (b) a light chain variable region CDR3 comprising the amino acid sequence of SEQ ID NO:491 or conservative modifications thereof; wherein the extracellular antigen-binding domain specifically binds FcRL5.

[0265] In certain embodiments, the presently disclosed subject matter provides an extracellular antigen-binding domain (e.g., scFv) comprising a heavy chain variable region comprising CDR1, CDR2, and CDR3 sequences and a light chain variable region comprising CDR1, CDR2, and CDR3 sequences, wherein: (a) the heavy chain variable region CDR1 comprises an amino acid sequence selected from the group consisting of SEQ ID NOs: 309, 315, 321, 326, 332, 335, 340, 346, 354, 360, 366, 372, 378, 387, 393, 403, 411, 420, 425, 436, 440, 444, 471, 480, 500, 510, 515, 520, 525, 537, 551, 559, 565, 582, 589, 923 and 929, and conservative modifications thereof; (b) the heavy chain variable region CDR2 comprises an amino acid sequence selected from the group consisting of SEQ ID NOs: 310, 316, 322, 327, 333, 336, 341, 355, 361, 367, 373, 379, 388, 404, 412, 421, 426, 431, 441, 445, 450, 466, 472, 475, 481, 496, 501, 506, 511, 516, 521, 526, 538, 552, 560, 566, 583, 590, 924 and 930, and conservative modifications thereof; (c) the heavy chain variable region CDR3 comprises an amino acid sequence selected from the group consisting of SEQ ID NOs: 311, 317, 323, 328, 334, 337, 342, 347, 351, 356, 362, 368, 374, 376, 380, 384, 389, 394, 396, 400, 405, 408, 412, 415, 422, 427, 432, 437, 442, 446, 451, 453, 456, 458, 459, 463, 464, 467, 473, 476, 482, 486, 489, 492, 494, 497, 502, 507, 512, 517, 522, 527, 529, 532, 536, 539, 543, 546, 550, 553, 555, 561, 567, 570, 574, 577, 578, 579, 584, 578, 587, 591, 925 and 931 and conservative modifications thereof; (d) the light chain variable region CDR1 comprises an amino acid sequence selected from the group consisting of SEQ ID NOs: 312, 3118, 324, 329, 338, 343, 348, 352, 357, 363, 369, 381, 390, 397, 401, 406, 416, 423, 428, 433, 447, 460, 468, 474, 477, 483, 490, 498, 503, 508, 518, 533, 540, 544, 547, 556, 562, 568, 571, 580, 585, 588, 926 and 932 and conservative modifications thereof; (e) the light chain variable region CDR2 comprises an amino acid sequence selected from the group consisting of SEQ ID NOs:313, 319, 330, 344, 349, 358, 364, 370, 382, 385, 391, 398, 409, 417, 429, 434, 438, 448, 454, 461, 469, 478, 484, 487, 504, 513, 523, 534, 429, 448, 548, 557, 563, 572, 575, 586, 927 and 933 and conservative modifications thereof; and (f) the light chain variable region CDR3 comprises an amino acid sequence selected from the group consisting of SEQ ID NOs: 314, 320, 325, 331, 339, 345, 350, 353, 359, 365, 371, 377, 383, 386, 392, 395, 399, 402, 407, 410, 414, 418, 419, 424, 430, 435, 439, 443, 449, 452, 455, 457, 462, 465, 470, 479, 485, 488, 491, 493, 495, 499, 505, 509, 514, 519, 524, 528, 530, 531, 535, 541, 542, 545, 549, 554, 558, 564, 569, 573, 576, 581, 592, 928 and 934 and conservative modifications thereof; wherein the extracellular antigen-binding domain specifically binds FcRL5.

[0266] In certain embodiments, the extracellular antigen-binding domain (e.g., scFv) comprises (a) a heavy chain variable region CDR1 comprising the amino acid sequence of SEQ ID NO:411 or conservative modifications thereof; (b) a heavy chain variable region CDR2 comprising the amino acid sequence of SEQ ID NO:412 or conservative modifications thereof; (c) a heavy chain variable region CDR3 comprising the amino acid sequence of SEQ ID NO:463 or conservative modifications thereof; (d) a light chain variable region CDR1 comprising the amino acid sequence of SEQ ID NO:318 or conservative modifications thereof; (e) a light chain variable region CDR2 comprising the amino acid sequence of SEQ ID NO:319 or conservative modifications thereof; and (f) a light chain variable region CDR3 comprising the amino acid sequence of SEQ ID NO:419 or conservative modifications thereof.

[0267] In certain embodiments, the extracellular antigen-binding domain (e.g., scFv) comprises (a) a heavy chain variable region CDR1 comprising the amino acid sequence of SEQ ID NO:515 or conservative modifications thereof; (b) a heavy chain variable region CDR2 comprising the amino acid sequence of SEQ ID NO:516 or conservative modifications thereof; (c) a heavy chain variable region CDR3 comprising the amino acid sequence of SEQ ID NO:517 or conservative modifications thereof; (d) a light chain variable region CDR1 comprising the amino acid sequence of SEQ ID NO:318 or conservative modifications thereof; (e) a light chain variable region CDR2 comprising the amino acid sequence of SEQ ID NO:319 or conservative modifications thereof; and (f) a light chain variable region CDR3 comprising the amino acid sequence of SEQ ID NO:531 or conservative modifications thereof.

[0268] In certain embodiments, the extracellular antigen-binding domain (e.g., scFv) comprises (a) a heavy chain variable region CDR1 comprising the amino acid sequence of SEQ ID NO:403 or conservative modifications thereof; (b) a heavy chain variable region CDR2 comprising the amino acid sequence of SEQ ID NO:404 or conservative modifications thereof; (c) a heavy chain variable region CDR3 comprising the amino acid sequence of SEQ ID NO:532 or conservative modifications thereof; (d) a light chain variable region CDR1 comprising the amino acid sequence of SEQ ID NO:533 or conservative modifications thereof; (e) a light chain variable region CDR2 comprising the amino acid sequence of SEQ ID NO:534 or conservative modifications thereof; and (f) a light chain variable region CDR3 comprising the amino acid sequence of SEQ ID NO:535 or conservative modifications thereof.

[0269] In certain embodiments, the extracellular antigen-binding domain (e.g., scFv) comprises (a) a heavy chain variable region CDR1 comprising the amino acid sequence of SEQ ID NO:411 or conservative modifications thereof; (b) a heavy chain variable region CDR2 comprising the amino acid sequence of SEQ ID NO:412 or conservative modifications thereof; (c) a heavy chain variable region CDR3 comprising the amino acid sequence of SEQ ID NO:543 or conservative modifications thereof; (d) a light chain variable region CDR1 comprising the amino acid sequence of SEQ ID NO:544 or conservative modifications thereof; (e) a light chain variable region CDR2 comprising the amino acid sequence of SEQ ID NO:448 or conservative modifications thereof; and (f) a light chain variable region CDR3 comprising the amino acid sequence of SEQ ID NO:545 or conservative modifications thereof.

[0270] In certain embodiments, the extracellular antigen-binding domain (e.g., scFv) comprises (a) a heavy chain variable region CDR1 comprising the amino acid sequence of SEQ ID NO:372 or conservative modifications thereof; (b) a heavy chain variable region CDR2 comprising the amino acid sequence of SEQ ID NO:475 or conservative modifications thereof; (c) a heavy chain variable region CDR3 comprising the amino acid sequence of SEQ ID NO:570 or conservative modifications thereof; (d) a light chain variable region CDR1 comprising the amino acid sequence of SEQ ID NO:571 or conservative modifications thereof; (e) a light chain variable region CDR2 comprising the amino acid sequence of SEQ ID NO:572 or conservative modifications thereof; and (f) a light chain variable region CDR3 comprising the amino acid sequence of SEQ ID NO:573 or conservative modifications thereof.

[0271] In certain embodiments, the extracellular antigen-binding domain (e.g., scFv) comprises (a) a heavy chain variable region CDR1 comprising amino acids having the sequence set forth in SEQ ID NO:923 or conservative modifications thereof; (b) a heavy chain variable region CDR2 comprising amino acids having the sequence set forth in SEQ ID NO:924 or conservative modifications thereof; (c) a heavy chain variable region CDR3 comprising amino acids having the sequence set forth in SEQ ID NO:925 or conservative modifications thereof; (d) a light chain variable region CDR1 comprising amino acids having the sequence set forth in SEQ ID NO:926 or conservative modifications thereof; (e) a light chain variable region CDR2 comprising amino acids having the sequence set forth in SEQ ID NO:927 or conservative modifications thereof; and (f) and a light chain variable region CDR3 comprising amino acids having the sequence set forth in SEQ ID NO:928 or conservative modifications thereof.

[0272] In certain embodiments, the extracellular antigen-binding domain (e.g., scFv) comprises (a) a heavy chain variable region CDR1 comprising amino acids having the sequence set forth in SEQ ID NO:929 or conservative modifications thereof; (b) a heavy chain variable region CDR2 comprising amino acids having the sequence set forth in SEQ ID NO:930 or conservative modifications thereof; (c) a heavy chain variable region CDR3 comprising amino acids having the sequence set forth in SEQ ID NO:931 or conservative modifications thereof; (d) a light chain variable region CDR1 comprising amino acids having the sequence set forth in SEQ ID NO:932 or conservative modifications thereof; (e) a light chain variable region CDR2 comprising amino acids having the sequence set forth in SEQ ID NO:933 or conservative modifications thereof, and (f) a light chain variable region CDR3 comprising amino acids having the sequence set forth in SEQ ID NO:934 or conservative modifications thereof.

[0273] In certain embodiments, a presently disclosed anti-FcRL5 antibody or antigen-binding fragment thereof comprises: (a) a heavy chain variable region CDR1 comprising the amino acid sequence of SEQ ID NO:440 or conservative modifications thereof; (b) a heavy chain variable region CDR2 comprising the amino acid sequence of SEQ ID NO:441 or conservative modifications thereof; (c) a heavy chain variable region CDR3 comprising the amino acid sequence of SEQ ID NO:442 or conservative modifications thereof; (d) a light chain variable region CDR1 comprising the amino acid sequence of SEQ ID NO:329 or conservative modifications thereof; (e) a light chain variable region CDR2 comprising the amino acid sequence of SEQ ID NO:330 or conservative modifications thereof; and (f) a light chain variable region CDR3 comprising the amino acid sequence of SEQ ID NO:443 or conservative modifications thereof.

[0274] In certain embodiments, a presently disclosed anti-FcRL5 antibody or antigen-binding fragment thereof comprises: (a) a heavy chain variable region CDR1 comprising the amino acid sequence of SEQ ID NO:309 or conservative modifications thereof; (b) a heavy chain variable region CDR2 comprising the amino acid sequence of SEQ ID NO:310 or conservative modifications thereof; (c) a heavy chain variable region CDR3 comprising the amino acid sequence of SEQ ID NO:489 or conservative modifications thereof; (d) a light chain variable region CDR1 comprising the amino acid sequence of SEQ ID NO:490 or conservative modifications thereof; (e) a light chain variable region CDR2 comprising the amino acid sequence of SEQ ID NO:313 or conservative modifications thereof; and (f) a light chain variable region CDR3 comprising the amino acid sequence of SEQ ID NO:491 or conservative modifications thereof.

[0275] As used herein, the terms “conservative sequence modifications” and “conservative modifications” refers to amino acid modifications that do not significantly affect or alter the binding characteristics of the presently disclosed CAR (e.g., the extracellular antigen-binding domain) comprising the amino acid sequence. Such conservative modifications include amino acid substitutions, additions and deletions. Modifications can be introduced into the human scFv of the presently disclosed subject matter by standard techniques known in the art, such as site-directed mutagenesis and PCR-mediated mutagenesis. Amino acids can be classified into groups according to their physicochemical properties such as charge and polarity.

[0276] Conservative amino acid substitutions are ones in which the amino acid residue is replaced with an amino acid within the same group. For example, amino acids can be classified by charge: positively-charged amino acids include lysine, arginine, histidine, negatively-charged amino acids include aspartic acid, glutamic acid, neutral charge amino acids include alanine, asparagine, cysteine, glutamine, glycine, isoleucine, leucine, methionine, phenylalanine, proline, serine, threonine, tryptophan, tyrosine, and valine. In addition, amino acids can be classified by polarity: polar amino acids include arginine (basic polar), asparagine, aspartic acid (acidic polar), glutamic acid (acidic polar), glutamine, histidine (basic polar), lysine (basic polar), serine, threonine, and tyrosine; non-polar amino acids include alanine, cysteine, glycine, isoleucine, leucine, methionine, phenylalanine, proline, tryptophan, and valine. Thus, one or more amino acid residues within a CDR region can be replaced with other amino acid residues from the same group and the altered antibody can be tested for retained function (i.e., the functions set forth in (c) through (1) above) using the functional assays 10 described herein. In certain embodiments, no more than one, no more than two, no more than three, no more than four, no more than five residues within a specified sequence or a CDR region are altered. Exemplary conservative amino acid substitutions are shown in Table 231.

TABLE 231

| Original | Exemplary conservative |
|---|---|
| Residue | amino acid Substitutions |
| Ala (A) | Val; Leu; Ile |
| Arg (R) | Lys; Gln; Asn |
| Asn (N) | Gln; His; Asp, Lys; Arg |
| Asp (D) | Glu; Asn |
| Cys (C) | Ser; Ala |
| Gln (Q) | Asn; Glu |
| Glu (E) | Asp; Gln |
| Gly (G) | Ala |
| His (H) | Asn; Gln; Lys; Arg |
| Ile (I) | Leu; Val; Met; Ala; Phe |
| Leu (L) | Ile; Val; Met; Ala; Phe |
| Lys (K) | Arg; Gln; Asn |
| Met (M) | Leu; Phe; Ile |
| Phe (F) | Trp; Leu; Val; Ile; Ala; Tyr |
| Pro (P) | Ala |
| Ser (S) | Thr |
| Thr (T) | Val; Ser |
| Trp (W) | Tyr; Phe |
| Tyr (Y) | Trp; Phe; Thr; Ser |
| Val (V) | Ile; Leu; Met; Phe; Ala |

[0277] In certain non-limiting embodiments, an extracellular antigen-binding domain of the CAR can comprise a linker connecting the heavy chain variable region and light chain variable region of the extracellular antigen-binding domain. As used herein, the term “linker” refers to a functional group (e.g., chemical or polypeptide) that covalently attaches two or more polypeptides or nucleic acids so that they are connected to one another. As used herein, a “peptide linker” refers to one or more amino acids used to couple two proteins together (e.g., to couple V_{H} and V_{L} domains). Non-limiting examples of peptide linkers are disclosed in Shen et al., Anal. Chem. 80(6):1910-1917 (2008). In one non-limiting example, the linker is a G4S linker that comprises amino acids having the sequence set forth in SEQ ID NO:897. In certain embodiments, the nucleotide sequence encoding the amino acid sequence of SEQ ID NO:897 is set forth in SEQ ID NO:898. In one non-limiting example, the linker comprises amino acids having the sequence set forth in SEQ ID NO:307. In certain embodiments, the nucleotide sequence encoding the amino acid sequence of SEQ ID NO:307 is set forth in SEQ ID NO:305.

[0278] In certain embodiments, the linker comprises amino acids having the sequence set forth in SEQ ID NO:901 as provided below.

[SEQ ID NO: 901]
GGGGS.

[0279] In certain embodiments, the the linker comprises amino acids having the sequence set forth in

[SEQ ID NO: 902]
SGGSGGS.

[0280] In certain embodiments, the the linker comprises amino acids having the sequence set forth in SEQ ID NO:903 as provided below.

[SEQ ID NO: 903]
GGGGSGGGS.

[0281] In certain embodiments, the the linker comprises amino acids having the sequence set forth in SEQ ID NO:904 as provided below.

[SEQ ID NO: 904]
GGGGSGGGGS.

[0282] In certain embodiments, the the linker comprises amino acids having the sequence set forth in SEQ ID NO:905 as provided below.

[SEQ ID NO: 905]

GGGGSGGGGSGGGGGGGS.

[0283] In certain embodiments, the the linker comprises amino acids having the sequence set forth in SEQ ID NO:906 as provided below.

[SEQ ID NO: 906]

GGGGSGGGGSGGGGSGGGGS.

[0284] In certain embodiments, the the linker comprises amino acids having the sequence set forth in SEQ ID NO:907 as provided below.

[SEQ ID NO: 907]

GGGGSGGGGSGGGGSGGGGSGGGGS.

[0285] In certain embodiments, the the linker comprises amino acids having the sequence set forth in 10 SEQ ID NO:908 as provided below.

[SEQ ID NO: 908]

GGGGSGGGGSGGGGSGGGGSGGGGSGGGGS.

[0286] In certain embodiments, the the linker comprises amino acids having the sequence set forth in SEQ ID NO:909 as provided below.

[SEQ ID NO: 909]

GGGGSGGGGSGGGGSGGGGSGGGGSGGGGSGGGGS.

[0287] In certain embodiments, the the linker comprises amino acids having the sequence set forth in SEQ ID NO:910 as provided below.

[SEQ ID NO: 910]

EPKSCDKTHTCPPCP.

[0288] In certain embodiments, the the linker comprises amino acids having the sequence set forth in SEQ ID NO:911 as provided below.

[SEQ ID NO: 911]

GGGGSGGGSEPKSCDKTHTCPPCP.

[0289] In certain embodiments, the the linker comprises amino acids having the sequence set forth in SEQ ID NO:912 as provided below.

[SEQ ID NO: 912]
ELKTPLGDTTHTCPRCPEPKSCDTPPPCPRCPEPKSCDTPPPCPRCPEPK
SCDTPPPCPRCP.

[0290] In certain embodiments, the the linker comprises amino acids having the sequence set forth in SEQ ID NO:913 as provided below.

[SEQ ID NO: 913]

GSGSGS.

[0291] In certain embodiments, the the linker comprises amino acids having the sequence set forth in SEQ ID NO:914 as provided below.

[SEQ ID NO: 914]

AAA.

[0292] In certain embodiments, the extracellular antigen-binding domain (e.g., scFv) comprises a heavy chain variable region, a light chain variable region and a linker peptide between the heavy chain variable region and the light chain variable region. Non-limiting examples of extracellular antigen-binding domains, e.g., scFvs, of the present disclosure that comprise a heavy chain variable region, a light chain variable region and a linker peptide are disclosed in Tables 77-152. For example, and not by way of limitation, the extracellular antigen-binding domain comprising a heavy chain variable region, a light chain variable region and a linker peptide of the present disclosure comprises an amino acid sequence selected from the group consisting of SEQ ID NO:594, SEQ ID NO:596, SEQ ID NO:598, SEQ ID NO:600, SEQ ID NO:602, SEQ ID NO:604, SEQ ID NO:606, SEQ ID NO:608, SEQ ID NO:610, SEQ ID NO:612, SEQ ID NO:614, SEQ ID NO:616, SEQ ID NO:618, SEQ ID NO:620, SEQ ID NO:622, SEQ ID NO:624, SEQ ID NO:626, SEQ ID NO:628, SEQ ID NO:630, SEQ ID NO:632, SEQ ID NO:634, SEQ ID NO:636, SEQ ID NO:638, SEQ ID NO:640, SEQ ID NO:642, SEQ ID NO:644, SEQ ID NO:646, SEQ ID NO:648, SEQ ID NO:650, SEQ ID NO:652, SEQ ID NO:654, SEQ ID NO:656, SEQ ID NO:658, SEQ ID NO:660, SEQ ID NO:662, SEQ ID NO:664, SEQ ID NO:666, SEQ ID NO:668, SEQ ID NO:670, SEQ ID NO:672, SEQ ID NO:674, SEQ ID NO:676, SEQ ID NO:678, SEQ ID NO:680, SEQ ID NO:682, SEQ ID NO:684, SEQ ID NO:686, SEQ ID NO:688, SEQ ID NO:690, SEQ ID NO:692, SEQ ID NO:694, SEQ ID NO:696, SEQ ID NO:698, SEQ ID NO:700, SEQ ID NO:702, SEQ ID NO:704, SEQ ID NO:706, SEQ ID NO:708, SEQ ID NO:710, SEQ ID NO:712, SEQ ID NO:714, SEQ ID NO:716, SEQ ID NO:718, SEQ ID NO:720, SEQ ID NO:722, SEQ ID NO:724, SEQ ID NO:726, SEQ ID NO:728, SEQ ID NO:730, SEQ ID NO:732, SEQ ID NO:734, SEQ ID NO:736, SEQ ID NO:738, SEQ ID NO:740, SEQ ID NO:742, SEQ ID NO:744 and conservative modifications of (as shown in Tables 77-152).

[0293] In certain embodiments, the extracellular antigen-binding domain (e.g., scFv) having a heavy chain variable region, a light chain variable region and a linker peptide comprises the amino acid sequence of SEQ ID NO:650 or conservative modifications of.

[0294] In certain embodiments, the extracellular antigen-binding domain (e.g., scFv) having a heavy chain variable region, a light chain variable region and a linker peptide comprises the amino acid sequence of SEQ ID NO:664 or conservative modifications of.

[0295] In certain embodiments, the extracellular antigen-binding domain (e.g., scFv) having a heavy chain variable region, a light chain variable region and a linker peptide comprises the amino acid sequence of SEQ ID NO:678 or conservative modifications of.

[0296] In certain embodiments, the extracellular antigen-binding domain (e.g., scFv) having a heavy chain variable region, a light chain variable region and a linker peptide comprises the amino acid sequence of SEQ ID NO:700 or conservative modifications of.

[0297] In certain embodiments, the extracellular antigen-binding domain (e.g., scFv) having a heavy chain variable region, a light chain variable region and a linker peptide comprises the amino acid sequence of SEQ ID NO:702 or conservative modifications of.

[0298] In certain embodiments, the extracellular antigen-binding domain (e.g., scFv) having a heavy chain variable region, a light chain variable region and a linker peptide comprises the amino acid sequence of SEQ ID NO:710 or conservative modifications of.

[0299] In certain embodiments, the extracellular antigen-binding domain (e.g., scFv) having a heavy chain variable region, a light chain variable region and a linker peptide comprises the amino acid sequence of SEQ ID NO:726 or conservative modifications of.

[0300] In certain embodiments, the extracellular antigen-binding domain (e.g., scFv) having a heavy chain variable region, a light chain variable region and a linker peptide comprises the amino acid sequence of SEQ ID NO:650 or conservative modifications of.

[0301] In certain embodiments, the extracellular antigen-binding domain (e.g., scFv) having a heavy chain variable region, a light chain variable region and a linker peptide comprises the amino acid sequence of SEQ ID NO:678 or conservative modifications of.

[0302] In addition, the extracellular antigen-binding domain can comprise a leader or a signal peptide that directs the nascent protein into the endoplasmic reticulum. Signal peptide or leader can be essential if the CAR is to be glycosylated and anchored in the cell membrane. The signal sequence or leader can be a peptide sequence (about 5, about 10, about 15, about 20, about 25, or about 30 amino acids long) present at the N-terminus of newly synthesized proteins that directs their entry to the secretory pathway. In non-limiting examples, the signal peptide is covalently joined to the 5′ terminus of the extracellular antigen-binding domain. In certain embodiments, the signal peptide comprises a CD8 polypeptide comprising amino acids having the sequence set forth in SEQ ID NO:26 as provided below.

[SEQ ID NO: 935]

MALPVTALLLPLALLLHAAR

[0303] The nucleotide sequence encoding the amino acid sequence of SEQ ID NO:935 is set forth in SEQ ID NO:936, which is provided below:

[SEQ ID NO: 936]
ATGGCTCTCCCAGTGACTGCCCTACTGCTTCCCCTAGCGCTTCTCCTGCA
TGCAGCTCGT

[0304] In another embodiment, the signal peptide comprises amino acids having the sequence set forth in SEQ ID NO:937 as provided below.

[SEQ ID NO: 937]

METDTLLLWVLLLWVPGSTG

[0305] The nucleotide sequence encoding the amino acid sequence of SEQ ID NO:937 is set forth in SEQ ID NO:938, which is provided below:

[SEQ ID NO: 938]
ATGGAAACCGACACCCTGCTGCTGTGGGTGCTGCTGCTGTGGGTGCCAGG
ATCCACAGGA

[0306] In certain embodiments, the extracellular antigen-binding domain, e.g., the human scFv, comprises a heavy chain variable region, a light chain variable region, a linker peptide between the heavy chain variable region and the light chain variable region, and an His-tag and an HA-tag. In certain embodiments, the amino acid sequence of the His-tag and HA-tag comprises the amino acid sequence of SEQ ID NO:308. The nucleotide sequence encoding SEQ ID NO: 308 is SEQ ID NO: 306.

[0307] In certain embodiments, the extracellular antigen-binding domain, e.g., the human scFv, binds to a human FcRL5 polypeptide comprising the amino acid sequence set forth in SEQ ID NO: 899. In certain embodiments, the extracellular antigen-binding domain, e.g., the human scFv, binds to an epitope in domain 9 (e.g., amino acids 754-835 of SEQ ID NO:899). In certain embodiments, the extracellular antigen-binding domain, e.g., the human scFv, binds to an epitope in domain 8 (e.g., amino acids 658-731 of SEQ ID NO:899). In certain embodiments, the extracellular antigen-binding domain, e.g., the human scFv, binds to an epitope within domain 9 comprising amino acids 829-840 of SEQ ID NO:899. In certain embodiments, the extracellular antigen-binding domain, e.g., the human scFv, binds to an epitope within domain 8 comprising amino acids 657-667 of SEQ ID NO:899. For example, and not by way of limitation, the extracellular antigen-binding domain, e.g., the human scFv, binds to an epitope comprising the amino acid sequence RSETVTLYITGL (SEQ ID NO:964). In certain embodiments, In certain embodiments, an antibody or an antigen-binding fragment thereof of the present disclosure binds to an epitope comprising the amino acid sequence SRPILTFRAPR (SEQ ID NO:965).

### Transmembrane Domain of a CAR

[0308] In certain non-limiting embodiments, the transmembrane domain of the CAR comprises a hydrophobic alpha helix that spans at least a portion of the membrane. Different transmembrane domains result in different receptor stability. After antigen recognition, receptors cluster and a signal is transmitted to the cell. In accordance with the presently disclosed subject matter, the transmembrane domain of the CAR can comprise a CD8 polypeptide, a CD28 polypeptide, a CD3ζ polypeptide, a CD4 polypeptide, a 4-1BB polypeptide, an OX40 polypeptide, an ICOS polypeptide, a CTLA-4 polypeptide, a PD-1 polypeptide, a LAG-3 polypeptide, a 2B4 polypeptide, a BTLA polypeptide, a synthetic peptide (not based on a protein associated with the immune response), or a combination thereof.

[0309] In certain embodiments, the transmembrane domain of a presently disclosed CAR comprises a CD28 polypeptide. The CD28 polypeptide can have an amino acid sequence that is at least about 85%, about 90%, about 95%, about 96%, about 97%, about 98%, about 99% or 100% homologous to the sequence having a NCBI Reference No: P10747 or NP_006130 (SEQ ID NO:939), or fragments thereof, and/or may optionally comprise up to one or up to two or up to three conservative amino acid substitutions. In non-limiting embodiments, the CD28 polypeptide can have an amino acid sequence that is a consecutive portion of SEQ ID NO:939 which is at least 20, or at least 30, or at least 40, or at least 50, and up to 220 amino acids in length. Alternatively or additionally, in non-limiting various embodiments, the CD28 polypeptide has an amino acid sequence of amino acids 1 to 220, 1 to 50, 50 to 100, 100 to 150, 150 to 200, or 200 to 220 of SEQ ID NO:939. In certain embodiments, the CAR of the presently disclosed subject matter comprises a transmembrane domain comprising a CD28 polypeptide, and an intracellular domain comprising a co-stimulatory signaling region that comprises a CD28 polypeptide. In certain embodiments, the CD28 polypeptide comprised in the transmembrane domain and the intracellular domain has an amino acid sequence of amino acids 114 to 220 of SEQ ID NO:939.

[0310] SEQ ID NO:939 is provided below:

| [SEQ ID NO: 939] | |
|---|---|
| 1 | MLRLLLALNL FPSIQVTGNK ILVKQSPMLV AYDNAVNLSC KYSYNLFSRE FRASLHKGLD |
| 61 | SAVEVCVVYG NYSQQLQVYS KTGFNCDGKL GNESVTFYLQ NLYVNQTDIY FCKIEVMYPP |
| 121 | PYLDNEKSNG TIIHVKGKHL CPSPLFPGPS KPFWVLVVVG GVLACYSLLV TVAFIIFWVR |
| 181 | SKRSRLLHSD YMNMTPRRPG PTRKHYQPYA PPRDFAAYRS |

[0311] In accordance with the presently disclosed subject matter, a “CD28 nucleic acid molecule” refers to a polynucleotide encoding a CD28 polypeptide. In certain embodiments, the CD28 nucleic acid molecule encoding the CD28 polypeptide comprised in the transmembrane domain and the intracellular domain (e.g., the co-stimulatory signaling region) of the presently disclosed CAR (amino acids 114 to 220 of SEQ ID NO:939) comprises nucleic acids having the sequence set forth in SEQ ID NO:940 as provided below.

[SEQ ID NO: 940]
ATTGAAGTTATGTATCCTCCTCCTTACCTAGACAATGAGAAGAGCAATGG
AACCATTATCCATGTGAAAGGGAAACACCTTTGTCCAAGTCCCCTATTTC
CCGGACCTTCTAAGCCCTTTTGGGTGCTGGTGGTGGTTGGTGGAGTCCTG
GCTTGCTATAGCTTGCTAGTAACAGTGGCCTTTATTATTTTCTGGGTGAG
GAGTAAGAGGAGCAGGCTCCTGCACAGTGACTACATGAACATGACTCCCC
GCCGCCCCGGGCCCACCCGCAAGCATTACCAGCCCTATGCCCCACCACGC
GACTTCGCAGCCTATCGCTCC.

[0312] In certain embodiments, the transmembrane domain of a presently disclosed CAR comprises a CD8 polypeptide. The CD8 polypeptide can have an amino acid sequence that is at least about 85%, about 90%, about 95%, about 96%, about 97%, about 98%, about 99% or 100% homologous to the sequence having a NCBI Reference No: AAH25715 (SEQ ID NO:960), or fragments thereof, and/or may optionally comprise up to one or up to two or up to three conservative amino acid substitutions. In non-limiting embodiments, the CD8 polypeptide can have an amino acid sequence that is a consecutive portion of SEQ ID NO:960 which is at least 20, or at least 30, or at least 40, or at least 50, or at least 70, or at least 100, or at least 150, or at least 200 and up to 235 amino acids in length. Alternatively or additionally, in non-limiting various embodiments, the CD8 polypeptide has an amino acid sequence of amino acids 1 to 235, 1 to 50, 50 to 100, 100 to 150, 150 to 200, 130 to 210, or 200 to 235 of SEQ ID NO:960. In certain embodiments, the CAR of the presently disclosed subject matter comprises a transmembrane domain comprising a CD8 polypeptide. In certain embodiments, the CD8 polypeptide comprised in the transmembrane domain has an amino acid sequence of amino acids 137 to 207 of SEQ ID NO:960.

[0313] SEQ ID NO:960 is provided below:

| [SEQ ID NO: 960] | |
|---|---|
| 1 | malpvtalll plalllhaar psqfrvspld rtwnlgetve lkcqvllsnp tsgcswlfqp |
| 61 | rgaaasptfl lylsqnkpka aegldtqrfs gkrlgdtfvl tlsdfrrene gcyfcsalsn |
| 121 | simyfshfvp vflpakpttt paprpptpap tiasqplslr peacrpaagg avhtrgldfa |
| 181 | cdiyiwapla gtcgvlllsl vitlycnhrn rrrvckcprp vvksgdkpsl saryv |

[0314] In accordance with the presently disclosed subject matter, a “CD8 nucleic acid molecule” refers to a polynucleotide encoding a CD8 polypeptide. In certain embodiments, the CD8 nucleic acid molecule encoding the CD8 polypeptide comprised in the transmembrane domain and the intracellular domain (e.g., the co-stimulatory signaling region) of the presently disclosed CAR (amino acids 137 to 207 of SEQ ID NO:960) comprises nucleic acids having the sequence set forth in SEQ ID NO:961 as provided below.

[SEQ ID NO: 961]
CCCACCACGACGCCAGCGCCGCGACCACCAACCCCGGCGCCCACGATCG
CGTCGCAGCCCCTGTCCCTGCGCCCAGAGGCGTGCCGGCCAGCGGCGGG
GGGCGCAGTGCACACGAGGGGGCTGGACTTCGCCTGTGATATCTACATC
TGGGCGCCCCTGGCCGGGACTTGTGGGGTCCTTCTCCTGTCACTGGTTA
TCACCCTTTACTGCAAC

[0315] In certain non-limiting embodiments, a CAR can also comprise a spacer region that links the extracellular antigen-binding domain to the transmembrane domain. The spacer region can be flexible enough to allow the antigen binding domain to orient in different directions to facilitate antigen recognition. The spacer region can be the hinge region from IgG1, or the CH₂CH₃ region of immunoglobulin and portions of CD3.

### Intracellular Domain of a CAR

[0316] In certain non-limiting embodiments, an intracellular domain of the CAR can comprise a CD3ζ polypeptide, which can activate or stimulate a cell (e.g., a cell of the lymphoid lineage, e.g., a T cell). CD3ζ comprises three ITAMs, and transmits an activation signal to the cell (e.g., a cell of the lymphoid lineage, e.g., a T cell) after antigen is bound. The CD3ζ polypeptide can have an amino acid sequence that is at least about 85%, about 90%, about 95%, about 96%, about 97%, about 98%, about 99% or about 100% homologous to the sequence set forth in SEQ ID NO:941, or fragments thereof, and/or may optionally comprise up to one or up to two or up to three conservative amino acid substitutions. In non-limiting embodiments, the CD3ζ polypeptide can have an amino acid sequence that is a consecutive portion of SEQ ID NO:941 which is at least 20, or at least 30, or at least 40, or at least 50, and up to 163 amino acids in length. Alternatively or additionally, in non-limiting various embodiments, the CD3ζ polypeptide has an amino acid sequence of amino acids 1 to 163, 1 to 50, 50 to 100, 100 to 150, or 150 to 163 of SEQ ID NO:941. In certain embodiments, the CD3ζ polypeptide comprised in the intracellular domain of a presently disclosed CAR has an amino acid sequence of amino acids 52 to 163 of SEQ ID NO: 941.

[0317] SEQ ID NO: 941 is provided below:

| [SEQ ID NO: 941] | |
|---|---|
| 1 | MKWKALFTAA ILQAQLPITE AQSFGLLDPK LCYLLDGILF IYGVILTALF LRVKFSRSAD |
| 61 | APAYQQGQNQ LYNELNLGRR EEYDVLDKRR GRDPEMGGKP RRKNPQEGLY NELQKDKMAE |
| 121 | AYSEIGMKGE RRRGKGHDGL YQGLSTATKD TYDALHMQAL PPR |

[0318] In accordance with the presently disclosed subject matter, a “CD3ζ nucleic acid molecule” refers to a polynucleotide encoding a CD3ζ polypeptide. In certain embodiments, the CD3ζ nucleic acid molecule encoding the CD3ζ polypeptide comprised in the intracellular domain of a presently disclosed CARs (amino acids 52 to 163 of SEQ ID NO: 941) comprises nucleic acids having the sequence set forth in SEQ ID NO:942 as provided below.

[SEQ ID NO: 942]
AGAGTGAAGTTCAGCAGGAGCGCAGACGCCCCCGCGTACCAGCAGGGCC
AGAACCAGCTCTATAACGAGCTCAATCTAGGACGAAGAGAGGAGTACGA
TGTTTTGGACAAGAGACGTGGCCGGGACCCTGAGATGGGGGGAAAGCCG
AGAAGGAAGAACCCTCAGGAAGGCCTGTACAATGAACTGCAGAAAGATA
AGATGGCGGAGGCCTACAGTGAGATTGGGATGAAAGGCGAGCGCCGGAG
GGGCAAGGGGCACGATGGCCTTTACCAGGGTCTCAGTACAGCCACCAAG
GACACCTACGACGCCCTTCACATGCAGGCCCTGCCCCCTCGCTAA

[0319] In certain non-limiting embodiments, an intracellular domain of the CAR further comprises at least one signaling region. The at least one signaling region can include a CD28 polypeptide, a 4-1BB polypeptide, an OX40 polypeptide, an ICOS polypeptide, a DAP-10 polypeptide, a PD-1 polypeptide, a CTLA-4 polypeptide, a LAG-3 polypeptide, a 2B4 polypeptide, a BTLA polypeptide, a synthetic peptide (not based on a protein associated with the immune response), or a combination thereof.

[0320] In certain embodiments, the signaling region is a co-stimulatory signaling region. In certain embodiments, the co-stimulatory region comprises at least one co-stimulatory molecule, which can provide optimal lymphocyte activation. As used herein, “co-stimulatory molecules” refer to cell surface molecules other than antigen receptors or their ligands that are required for an efficient response of lymphocytes to antigen. The at least one co-stimulatory signaling region can include a CD28 polypeptide, a 4-1BB polypeptide, an OX40 polypeptide, an ICOS polypeptide, a DAP-10 polypeptide, or a combination thereof. The co-stimulatory molecule can bind to a co-stimulatory ligand, which is a protein expressed on cell surface that upon binding to its receptor produces a co-stimulatory response, i.e., an intracellular response that effects the stimulation provided when an antigen binds to its CAR molecule. Co-stimulatory ligands, include, but are not limited to CD80, CD86, CD70, OX40L, 4-1BBL, CD48, TNFRSF14, and PD-L1. As one example, a 4-1BB ligand (i.e., 4-1BBL) may bind to 4-1BB (also known as “CD137”) for providing an intracellular signal that in combination with a CAR signal induces an effector cell function of the CAR+ T cell. CARs comprising an intracellular domain that comprises a co-stimulatory signaling region comprising 4-1BB, ICOS or DAP-10 are disclosed in U.S. Pat. No. 7,446,190 (e.g., the nucleotide sequence encoding 4-1BB is set forth in SEQ ID NO:15, the nucleotide sequence encoding ICOS is set forth in SEQ ID NO:16, and the nucleotide sequence encoding DAP-10 is set forth in SEQ ID NO:17 in U.S. Pat. No. 7,446,190), which is herein incorporated by reference in its entirety. In certain embodiments, the intracellular domain of the CAR comprises a co-stimulatory signaling region that comprises a CD28 polypeptide. In certain embodiments, the intracellular domain of the CAR comprises a co-stimulatory signaling region that comprises two co-stimulatory molecules:CD28 and 4-1BB or CD28 and OX40. 4-1BB can act as a tumor necrosis factor (TNF) ligand and have stimulatory activity. The 4-1BB polypeptide can have an amino acid sequence that is at least about 85%, about 90%, about 95%, about 96%, about 97%, about 98%, about 99% or 100% homologous to the sequence having a NCBI Reference No: P41273 or NP_001552 (SEQ ID NO:943) or fragments thereof, and/or may optionally comprise up to one or up to two or up to three conservative amino acid substitutions. In certain embodiments, the 4-1BB polypeptide comprised in the intracellular domain of a presently disclosed CAR has an amino acid sequence of amino acids 214 to 255 of SEQ ID NO: 943. SEQ ID NO:943 is provided below:

| [SEQ ID NO: 943] | |
|---|---|
| 1 | MGNSCYNIVA TLLLVLNFER TRSLQDPCSN CPAGTFCDNN RNQICSPCPP NSFSSAGGQR |
| 61 | TCDICRQCKG VFRTRKECSS TSNAECDCTP GFHCLGAGCS MCEQDCKQGQ ELTKKGCKDC |
| 121 | CFGTFNDQKR GICRPWTNCS LDGKSVLVNG TKERDVVCGP SPADLSPGAS SVTPPAPARE |
| 181 | PGHSPQIISF FLALTSTALL FLLFFLTLRF SVVKRGRKKL LYIFKQPFMR PVQTTQEEDG |
| 241 | CSCRFPEEEE GGCEL |

[0321] In accordance with the presently disclosed subject matter, a “4-1BB nucleic acid molecule” refers to a polynucleotide encoding a 4-1BB polypeptide. In certain embodiments, the 4-1BB nucleic acid molecule encoding the 4-1BB polypeptide comprised in the intracellular domain of a presently disclosed CARs (amino acids 214 to 255 of SEQ ID NO: 943) comprises nucleic acids having the sequence set forth in SEQ ID NO: 962 as provided below.

[SEQ ID NO: 962]
AAACGGGGCAGAAAGAAGCTCCTGTATATATTCAAACAACCATTTATGA
GACCAGTACAAACTACTCAAGAGGAAGATGGCTGTAGCTGCCGATTTCC
AGAAGAAGAAGAAGGAGGATGTGAACTG

[0322] An OX40 polypeptide can have an amino acid sequence that is at least about 85%, about 90%, about 95%, about 96%, about 97%, about 98%, about 99% or 100% homologous to the sequence having a NCBI Reference No: P43489 or NP_003318 (SEQ ID NO:944), or fragments thereof, and/or may optionally comprise up to one or up to two or up to three conservative amino acid substitutions. SEQ ID NO:944 is provided below:

| [SEQ ID NO: 944] | |
|---|---|
| 1 | MCVGARRLGR GPCAALLLLG LGLSTVTGLH CVGDTYPSND RCCHECRPGN GMVSRCSRSQ |
| 61 | NTVCRPCGPG FYNDVVSSKP CKPCTWCNLR SGSERKQLCT ATQDTVCRCR AGTQPLDSYK |
| 121 | PGVDCAPCPP GHFSPGDNQA CKPWTNCTLA GKHTLQPASN SSDAICEDRD PPATQPQETQ |
| 181 | GPPARPITVQ PTEAWPRTSQ GPSTRPVEVP GGRAVAAILG LGLVLGLLGP LAILLALYLL |
| 241 | RRDQRLPPDA HKPPGGGSFR TPIQEEQADA HSTLAKI |

[0323] In accordance with the presently disclosed subject matter, an “OX40 nucleic acid molecule” refers to a polynucleotide encoding an OX40 polypeptide.

[0324] An ICOS polypeptide can have an amino acid sequence that is at least about 85%, about 90%, about 95%, about 96%, about 97%, about 98%, about 99% or 100% homologous to the sequence having a NCBI Reference No: NP_036224 (SEQ ID NO:945) or fragments thereof, and/or may optionally comprise up to one or up to two or up to three conservative amino acid substitutions.

[0325] SEQ ID NO:945 is provided below:

| [SEQ ID NO: 945] | |
|---|---|
| 1 | MKSGLWYFFL FCLRIKVLTG EINGSANYEM FIFHNGGVQI LCKYPDIVQQ FKMQLLKGGQ |
| 61 | ILCDLTKTKG SGNTVSIKSL KFCHSQLSNN SVSFFLYNLD HSHANYYFCN LSIFDPPPFK |
| 121 | VTLTGGYLHI YESQLCCQLK FWLPIGCAAF VVVCILGCIL ICWLTKKKYS SSVHDPNGEY |
| 181 | MFMRAVNTAK KSRLTDVTL |

[0326] In accordance with the presently disclosed subject matter, an “ICOS nucleic acid molecule” refers to a polynucleotide encoding an ICOS polypeptide.

[0327] CTLA-4 is an inhibitory receptor expressed by activated T cells, which when engaged by its corresponding ligands (CD80 and CD86; B7-1 and B7-2, respectively), mediates activated T cell inhibition or anergy. In both preclinical and clinical studies, CTLA-4 blockade by systemic antibody infusion, enhanced the endogenous anti-tumor response albeit, in the clinical setting, with significant unforeseen toxicities.

[0328] CTLA-4 contains an extracellular V domain, a transmembrane domain, and a cytoplasmic tail. Alternate splice variants, encoding different isoforms, have been characterized. The membrane-bound isoform functions as a homodimer interconnected by a disulfide bond, while the soluble isoform functions as a monomer. The intracellular domain is similar to that of CD28, in that it has no intrinsic catalytic activity and contains one YVKM motif able to bind PI3K, PP2A and SHP-2 and one proline-rich motif able to bind SH3 containing proteins. One role of CTLA-4 in inhibiting T cell responses seem to be directly via SHP-2 and PP2A dephosphorylation of TCR-proximal signaling proteins such as CD3 and LAT. CTLA-4 can also affect signaling indirectly via competing with CD28 for CD80/86 binding. CTLA-4 has also been shown to bind and/or interact with PI3K, CD80, AP2M1, and PPP2R5A.

[0329] In accordance with the presently disclosed subject matter, a CTLA-4 polypeptide can have an amino acid sequence that is at least about 85%, about 90%, about 95%, about 96%, about 97%, about 98%, about 99% or about 100% homologous to UniProtKB/Swiss-Prot Ref. No.: P16410.3 (SEQ ID NO:946) (homology herein may be determined using standard software such as BLAST or FASTA) or fragments thereof, and/or may optionally comprise up to one or up to two or up to three conservative amino acid substitutions.

[0330] SEQ ID NO:946 is provided below:

| [SEQ ID NO: 946] | |
|---|---|
| 1 | MACLGFQRHK AQLNLATRTW PCTLLFFLLF IPVFCKAMHV AQPAVVLASS RGIASFVCEY |
| 61 | ASPGKATEVR VTVLRQADSQ VTEVCAATYM MGNELTFLDD SICTGTSSGN QVNLTIQGLR |
| 121 | AMDTGLYICK VELMYPPPYY LGIGNGTQIY VIDPEPCPDS DFLLWILAAV SSGLFFYSFL |
| 181 | LTAVSLSKML KKRSPLTTGV YVKMPPTEPE CEKQFQPYFI PIN |

[0331] In accordance with the presently disclosed subject matter, a “CTLA-4 nucleic acid molecule” refers to a polynucleotide encoding a CTLA-4 polypeptide.

[0332] PD-1 is a negative immune regulator of activated T cells upon engagement with its corresponding ligands PD-L1 and PD-L2 expressed on endogenous macrophages and dendritic cells. PD-1 is a type I membrane protein of 268 amino acids. PD-1 has two ligands, PD-L1 and PD-L2, which are members of the B7 family. The protein's structure comprises an extracellular IgV domain followed by a transmembrane region and an intracellular tail. The intracellular tail contains two phosphorylation sites located in an immunoreceptor tyrosine-based inhibitory motif and an immunoreceptor tyrosine-based switch motif, that PD-1 negatively regulates TCR signals. SHP-I and SHP-2 phosphatases bind to the cytoplasmic tail of PD-1 upon ligand binding. Upregulation of PD-L1 is one mechanism tumor cells may evade the host immune system. In pre-clinical and clinical trials, PD-1 blockade by antagonistic antibodies induced anti-tumor responses mediated through the host endogenous immune system.

[0333] In accordance with the presently disclosed subject matter, a PD-1 polypeptide can have an amino acid sequence that is at least about 85%, about 90%, about 95%, about 96%, about 97%, about 98%, about 99% or about 100% homologous to NCBI Reference No: NP_005009.2 (SEQ ID NO:947) or fragments thereof, and/or may optionally comprise up to one or up to two or up to three conservative amino acid substitutions.

[0334] SEQ ID NO:947 is provided below:

| [SEQ ID NO: 947] | |
|---|---|
| 1 | MQIPQAPWPV VWAVLQLGWR PGWFLDSPDR PWNPPTFSPA LLVVTEGDNA TFTCSFSNTS |
| 61 | ESFVLNWYRM SPSNQTDKLA AFPEDRSQPG QDCRFRVTQL PNGRDFHMSV VRARRNDSGT |
| 121 | YLCGAISLAP KAQIKESLRA ELRVTERRAE VPTAHPSPSP RPAGQFQTLV VGVVGGLLGS |
| 181 | LVLLVWVLAV ICSRAARGTI GARRTGQPLK EDPSAVPVFS VDYGELDFQW REKTPEPPVP |
| 241 | CVPEQTEYAT IVFPSGMGTS SPARRGSADG PRSAQPLRPE DGHCSWPL |

[0335] In accordance with the presently disclosed subject matter, a “PD-1 nucleic acid molecule” refers to a polynucleotide encoding a PD-1 polypeptide.

[0336] Lymphocyte-activation protein 3 (LAG-3) is a negative immune regulator of immune cells. LAG-3 belongs to the immunoglobulin (lg) superfamily and contains 4 extracellular Ig-like domains. The LAG3 gene contains 8 exons. The sequence data, exon/intron organization, and chromosomal localization all indicate a close relationship of LAG3 to CD4. LAG3 has also been designated CD223 (cluster of differentiation 223).

[0337] In accordance with the the presently disclosed subject matter, a LAG-3 polypeptide can have an amino acid sequence that is at least about 85%, about 90%, about 95%, about 96%, about 97%, about 98%, about 99% or about 100% homologous to UniProtKB/Swiss-Prot Ref. No.: P18627.5 (SEQ ID NO:948) or fragments thereof, and/or may optionally comprise up to one or up to two or up to three conservative amino acid substitutions.

[0338] SEQ ID NO:948 is provided below:

| [SEQ ID NO: 948] | |
|---|---|
| 1 | MWEAQFLGLL FLQPLWVAPV KPLQPGAEVP VVWAQEGAPA QLPCSPTIPL QDLSLLRRAG |
| 61 | VTWQHQPDSG PPAAAPGHPL APGPHPAAPS SWGPRPRRYT VLSVGPGGLR SGRLPLQPRV |
| 121 | QLDERGRQRG DFSLWLRPAR RADAGEYRAA VHLRDRALSC RLRLRLGQAS MTASPPGSLR |
| 181 | ASDWVILNCS FSRPDRPASV HWFRNRGQGR VPVRESPHHH LAESFLFLPQ VSPMDSGPWG |
| 241 | CILTYRDGFN VSIMYNLTVL GLEPPTPLTV YAGAGSRVGL PCRLPAGVGT RSFLTAKWTP |
| 301 | PGGGPDLLVT GDNGDFTLRL EDVSQAQAGT YTCHIHLQEQ QLNATVTLAI ITVTPKSFGS |
| 361 | PGSLGKLLCE VTPVSGQERF VWSSLDTPSQ RSFSGPWLEA QEAQLLSQPW QCQLYQGERL |
| 421 | LGAAVYFTEL SSPGAQRSGR APGALPAGHL LLFLILGVLS LLLLVTGAFG FHLWRRQWRP |
| 481 | RRFSALEQGI HPPQAQSKIE ELEQEPEPEP EPEPEPEPEP EPEQL |

[0339] In accordance with the presently disclosed subject matter, a “LAG-3 nucleic acid molecule” refers to a polynucleotide encoding a LAG-3 polypeptide.

[0340] Natural Killer Cell Receptor 2B4 (2B4) mediates non-MHC restricted cell killing on NK cells and subsets of T cells. To date, the function of 2B4 is still under investigation, with the 2B4-S isoform believed to be an activating receptor, and the 2B4-L isoform believed to be a negative immune regulator of immune cells. 2B4 becomes engaged upon binding its high-affinity ligand, CD48. 2B4 contains a tyrosine-based switch motif, a molecular switch that allows the protein to associate with various phosphatases. 2B4 has also been designated CD244 (cluster of differentiation 244). In accordance with the presently disclosed subject matter, a 2B4 polypeptide can have an amino acid sequence that is at least about 85%, about 90%, about 95%, about 96%, about 97%, about 98%, about 99% or about 100% homologous to UniProtKB/Swiss-Prot Ref. No.: Q9BZW8.2 (SEQ ID NO:949) or fragments thereof, and/or may optionally comprise up to one or up to two or up to three conservative amino acid substitutions.

[0341] SEQ ID NO:949 is provided below:

| [SEQ ID NO: 949] | |
|---|---|
| 1 | MLGQVVTLIL LLLLKVYQGK GCQGSADHVV SISGVPLQLQ PNSIQTKVDS IAWKKLLPSQ |
| 61 | NGFHHILKWE NGSLPSNTSN DRFSFIVKNL SLLIKAAQQQ DSGLYCLEVT SISGKVQTAT |
| 121 | FQVFVFESLL PDKVEKPRLQ GQGKILDRGR CQVALSCLVS RDGNVSYAWY RGSKLIQTAG |
| 181 | NLTYLDEEVD INGTHTYTCN VSNPVSWESH TLNLTQDCQN AHQEFRFWPF LVIIVILSAL |
| 241 | FLGTLACFCV WRRKRKEKQS ETSPKEFLTI YEDVKDLKTR RNHEQEQTFP GGGSTIYSMI |
| 301 | QSQSSAPTSQ EPAYTLYSLI QPSRKSGSRK RNHSPSFNST IYEVIGKSQP KAQNPARLSR |
| 361 | KELENFDVYS |

[0342] In accordance with the presently disclosed subject matter, a “2B4 nucleic acid molecule” refers to a polynucleotide encoding a 2B4 polypeptide.

[0343] B- and T-lymphocyte attenuator (BTLA) expression is induced during activation of T cells, and BTLA remains expressed on Th1 cells but not Th2 cells. Like PD1 and CTLA4, BTLA interacts with a B7 homolog, B7H4. However, unlike PD-1 and CTLA-4, BTLA displays T-Cell inhibition via interaction with tumor necrosis family receptors (TNF-R), not just the B7 family of cell surface receptors. BTLA is a ligand for tumor necrosis factor (receptor) superfamily, member 14 (TNFRSF14), also known as herpes virus entry mediator (HVEM). BTLA-HVEM complexes negatively regulate T-cell immune responses. BTLA activation has been shown to inhibit the function of human CD8⁺ cancer-specific T cells. BTLA has also been designated as CD272 (cluster of differentiation 272).

[0344] In accordance with the presently disclosed subject matter, a BTLA polypeptide can have an amino acid sequence that is at least about 85%, about 90%, about 95%, about 96%, about 97%, about 98%, about 99% or about 100% homologous to UniProtKB/Swiss-Prot Ref. No.: Q7Z6A9.3 (SEQ ID NO:950) or fragments thereof, and/or may optionally comprise up to one or up to two or up to three conservative amino acid substitutions.

[0345] SEQ ID NO:950 is provided below:

| | [SEQ ID NO: 950] |
|---|---|
| 1 | MKTLPAMLGT GKLFWVFFLI PYLDIWNIHG KESCDVQLYI KRQSEHSILA GDPFELECPV |
| 61 | KYCANRPHVT WCKLNGTTCV KLEDRQTSWK EEKNISFFIL HFEPVLPNDN GSYRCSANFQ |
| 121 | SNLIESHSTT LYVTDVKSAS ERPSKDEMAS RPWLLYRLLP LGGLPLLITT CFCLFCCLRR |
| 181 | HQGKQNELSD TAGREINLVD AHLKSEQTEA STRQNSQVLL SETGIYDNDP DLCFRMQEGS |
| 241 | EVYSNPCLEE NKPGIVYASL NHSVIGPNSR LARNVKEAPT EYASICVRS |

[0346] In accordance with the presently disclosed subject matter, a “BTLA nucleic acid molecule” refers to a polynucleotide encoding a BTLA polypeptide.

[0347] In certain embodiments, the CAR comprises an extracellular antigen-binding region that specifically binds to human FcRL5, a transmembrane domain comprising a CD28 polypeptide, and an intracellular domain comprising a CD3ζ polypeptide and a co-stimulatory signaling region that comprises a CD28 polypeptide, as shown in FIG. 9. As shown in FIG. 9, the CAR also comprises a signal peptide or a leader covalently joined to the 5′ terminus of the extracellular antigen-binding domain. The signal peptide comprises a CD8 polypeptide.

[0348] In certain embodiments, the CAR of the presently disclosed subject matter can further comprise an inducible promoter, for expressing nucleic acid sequences in human cells. Promoters for use in expressing CAR genes can be a constitutive promoter, such as ubiquitin C (UbiC) promoter.

[0349] The presently disclosed subject matter also provides isolated nucleic acid molecule encoding the FcRL5-targeted CAR described herein or a functional portion thereof. In certain embodiments, the isolated nucleic acid molecule encodes a presently disclosed FcRL5-targeted CAR comprising an scFv that specifically binds to human FcRL5, a transmembrane domain comprising a CD28 polypeptide, and an intracellular domain comprising a CD3 polypeptide and a co-stimulatory signaling region comprising a CD28 polypeptide. In certain embodiments, the scFv is a fully human scFv. In certain embodiments, the scFv is a murine scFv. In certain non-limiting embodiments, the isolated nucleic acid molecule comprises nucleic acids having the sequence set forth in SEQ ID NO:951 provided below:

[SEQ ID NO: 951]
ATGGCTCTCCCAGTGACTGCCCTACTGCTTCCCCTAGCGCTTCTCCTGC
ATGCAGCTCGTGTGAAGCTGCAGGAGTCTGGGGGAGGCTTAGTGCAGCC
TGGAGGGTCCCGGAAACTCTCCTGTGCAGCCTCTGGATTCACTTTCAGT
ATCTTTGGATTGCACTGGGTTCGTCAGGCTCCAGAGAAGGGGCTGGAGT
GGGTCGCATACATTAGTGGTGACAGTAATACCATCTACTATGCAGACAC
AGTGAAGGGCCGATTCACCATCTCCAGAGACAATCCCAAGAACACCCTG
TTCCTGCAAATGACCAGTCTAAGGTCTGAGGACACGGCCATGTATTACT
GTGCAAGAAATAGCTACTATGCTCTGGACTACTGGGGCCAAGGGACCAC
GGTCACCGTCTCCTCAGGTGGAGGTGGATCAGGTGGAGGTGGATCTGGT
GGAGGTGGATCTGACATTGAGCTCACCCAGTCTCCAGCAATCATGTCTG
TATCTCCAGGTGAAAAGGTCACCATGACCTGCAGGGCCAGCTCAAGTGT
CAGTTCCAGTTACTTGCACTGGTACCAGCAGAGGTCAGGTGCCTCCCCC
AAAATCTGGATTTATAGCACATCCAACTTGGCTTCTGGAGTCCCTGCTC
GCTTCAGTGGCAGTGGGACTGGGACCTCTTACTCTCTCACAATCAGCAG
TGTGGAGGCTGAAGATGCTGCCACTTATTACTGCCAGCAGTACAGTGGT
TACCCGTGGACGTTCGGTGGAGGGACCAAGCTGGAGATCGAACAAAAAC
TCATCTCAGAAGAGGATCTGGCGGCCGCAATTGAAGTTATGTATCCTCC
TCCTTACCTAGACAATGAGAAGAGCAATGGAACCATTATCCATGTGAAA
GGGAAACACCTTTGTCCAAGTCCCCTATTTCCCGGACCTTCTAAGCCCT
TTTGGGTGCTGGTGGTGGTTGGTGGAGTCCTGGCTTGCTATAGCTTGCT
AGTAACAGTGGCCTTTATTATTTTCTGGGTGAGGAGTAAGAGGAGCAGG
CTCCTGCACAGTGACTACATGAACATGACTCCCCGCCGCCCCGGGCCCA
CCCGCAAGCATTACCAGCCCTATGCCCCACCACGCGACTTCGCAGCCTA
TCGCTCCAGAGTGAAGTTCAGCAGGAGCGCAGACGCCCCCGCGTACCAG
CAGGGCCAGAACCAGCTCTATAACGAGCTCAATCTAGGACGAAGAGAGG
AGTACGATGTTTTGGACAAGAGACGTGGCCGGGACCCTGAGATGGGGGG
AAAGCCGAGAAGGAAGAACCCTCAGGAAGGCCTGTACAATGAACTGCAG
AAAGATAAGATGGCGGAGGCCTACAGTGAGATTGGGATGAAAGGCGAGC
GCCGGAGGGGCAAGGGGCACGATGGCCTTTACCAGGGTCTCAGTACAGC
CACCAAGGACACCTACGACGCCCTTCACATGCAGGCCCTGCCCCCTCGC
TAA

The isolated nucleic acid molecule having the nucleotide sequence of SEQ ID NO:951 encodes a FcRL-5-targeted CAR comprising a murine scFv that comprises a heavy chain variable region comprising amino acids having the sequence set forth in SEQ ID NO:915, a light chain variable region comprising amino acids having the sequence set forth in SEQ ID NO:917, and a linker having an amino acid sequence of SEQ ID NO:897 positioned between the heavy chain variable region and the light chain variable region, a transmembrane domain comprising a CD28 polypeptide, and an intracellular domain comprising a CD3 polypeptide and a co-stimulatory signaling region comprising a CD28 polypeptide.

[0350] In another specific non-limiting example, the isolated nucleic acid molecule comprises nucleic acids having the sequence set forth in SEQ ID NO:952 provided below:

[SEQ ID NO: 952]
ATGGAGACAGACACACTCCTGCTATGGGTACTGCTGCTCTGGGTTCCAG
GTTCCACTGGTGACGTCCAACTGCAGGAGTCAGGGGGAGGCTTAGTGCA
GCCTGGAGGGTCCCGGAAACTCTCCTGTACAGCCTCTGGATTCACTTTC
AGTAGCTTTGGAATGCACTGGGTTCGTCAGGCTCCAGAGAAGGGGCTGG
AGTGGGTCGCATACATTAGTAGTGGCAGTAATAACATCTACTTTGCGGA
CACAGTGAAGGGCCGATTCACCATCTCCAGAGACAATCCCAAGAACACC
CTGTTCCTGCAAATGACCAGTCTAAGGTCTGAGGACACGGCCATGTATT
ACTGTGCAAGATCGGAATACTACGGTAGTAGCCATATGGACTACTGGGG
CCAAGGGACCACGGTCACCGTCTCCTCAGGTGGAGGTGGATCAGGTGGA
GGTGGATCTGGTGGAGGTGGATCTGACATTGAGCTCACCCAGTCTCCAA
AATTCATGTCCACATCAGTAGGAGACAGGGTCAGCGTCACCTGCAAGGC
CAGTCAGAATGTGGGTACTAATGTAGCCTGGTATCAACAGAAACCAGGA
CAATCTCCTAAACCACTGATTTACTCGGCAACCTACCGGAACAGTGGAG
TCCCTGATCGCTTCACAGGCAGTGGATCTGGGACAGATTTCACTCTCAC
CATCACTAACGTGCAGTCTAAAGACTTGGCAGACTATTTCTGTCAACAA
TATAACAGGTATCCGTACACGTCCGGAGGGGGGACCAAGCTGGAGATCG
AACAAAAACTCATCTCAGAAGAGGATCTGGCGGCCGCAATTGAAGTTAT
GTATCCTCCTCCTTACCTAGACAATGAGAAGAGCAATGGAACCATTATC
CATGTGAAAGGGAAACACCTTTGTCCAAGTCCCCTATTTCCCGGACCTT
CTAAGCCCTTTTGGGTGCTGGTGGTGGTTGGTGGAGTCCTGGCTTGCTA
TAGCTTGCTAGTAACAGTGGCCTTTATTATTTTCTGGGTGAGGAGTAAG
AGGAGCAGGCTCCTGCACAGTGACTACATGAACATGACTCCCCGCCGCC
CCGGGCCCACCCGCAAGCATTACCAGCCCTATGCCCCACCACGCGACTT
CGCAGCCTATCGCTCCAGAGTGAAGTTCAGCAGGAGCGCAGACGCCCCC
GCGTACCAGCAGGGCCAGAACCAGCTCTATAACGAGCTCAATCTAGGAC
GAAGAGAGGAGTACGATGTTTTGGACAAGAGACGTGGCCGGGACCCTGA
GATGGGGGGAAAGCCGAGAAGGAAGAACCCTCAGGAAGGCCTGTACAAT
GAACTGCAGAAAGATAAGATGGCGGAGGCCTACAGTGAGATTGGGATGA
AAGGCGAGCGCCGGAGGGGCAAGGGGCACGATGGCCTTTACCAGGGTCT
CAGTACAGCCACCAAGGACACCTACGACGCCCTTCACATGCAGGCCCTG
CCCCCTCGCTAA.

The isolated nucleic acid molecule having the nucleotide sequence of SEQ ID NO:952 encodes a FcRL-5-targeted CAR comprising a murine scFv that comprises a heavy chain variable region comprising amino acids having the sequence set forth in SEQ ID NO:919, a light chain variable region comprising amino acids having the sequence set forth in SEQ ID NO:921, and a linker having an amino acid sequence of SEQ ID NO:897 positioned between the heavy chain variable region and the light chain variable region, a transmembrane domain comprising a CD28 polypeptide, and an intracellular domain comprising a CD3 ζ polypeptide and a co-stimulatory signaling region comprising a CD28 polypeptide.

[0351] In certain embodiments, the isolated nucleic acid molecule comprises nucleic acids having the sequence set forth in SEQ ID NO:953 provided below:

[SEQ ID NO: 953]
CCGGTGGTACCTCACCCTTACCGAGTCGGCGACACAGTGTGGGTCCGCC
GACACCAGACTAAGAACCTAGAACCTCGCTGGAAAGGACCTTACACAGT
CCTGCTGACCACCCCCACCGCCCTCAAAGTAGACGGCATCGCAGCTTGG
ATACACGCCGCCCACGTGAAGGCTGCCGACCCCGGGGGTGGACCATCCT
CTAGACTGCCATGGAAACCGATACACTGCTGCTGTGGGTGCTGCTGCTG
TGGGTGCCAGGATCCACAGGCTCCTATGTGCTGACTCAGCCACCCTCAG
TGTCAGTGGCCCCAGGAAAGACGGCCAGGATTACCTGTGGGGGAAACAA
CATTGGAAGTAAAAGTGTGCACTGGTACCAGCAGAAGCCAGGCCAGGCC
CCTGTGCTGGTCATCTATTATGATAGCGACCGGCCCTCAGGGATCCCTG
AGCGATTCTCTGGCTCCAACTCTGGGAACACGGCCACCCTGACCATCAG
CAGGGTCGAAGCCGGGGATGAGGCCGACTATTACTGTCAGGTGTGGGAT
AGTAGTAGTGATTATGTCTTCGGAACTGGGACCAAGGTCACCGTCCTAG
GTTCTAGAGGTGGTGGTGGTAGCGGCGGCGGCGGCTCTGGTGGTGGTGG
ATCCCTCGAGATGGCCGAGGTGCAGCTGGTGGAGACTGGGGGAGGCTTG
GTCAAGCCTGGAGGGTCCCTGAGACTCTCCTGTGCAGCCTCTGGATTCA
CCGTCAGTGACTACTACATGAGCTGGATCCGCCAGGCTCCAGGGAAGGG
CCTGGAGTGGATTTCATACATTAGTGGTAGTGGTAATAGCATATACTAC
GCAGACTCTGTGAAGGGCCGATTCACCATCTCCAGGGACAACGCCAAGA
ACTCACTGGATCTGCAAATGACCAGCCTGAGAGCCGAGGACACGGCCGT
ATATTACTGTGCGCGCTCTACTAAATTCGATTACTGGGGTCAAGGTACT
CTGGTGACCGTCTCCTCAGCGGCCGCACCCACCACGACGCCAGCGCCGC
GACCACCAACCCCGGCGCCCACGATCGCGTCGCAGCCCCTGTCCCTGCG
CCCAGAGGCGTGCCGGCCAGCGGCGGGGGGCGCAGTGCACACGAGGGGG
CTGGACTTCGCCTGTGATATCTACATCTGGGCGCCCCTGGCCGGGACTT
GTGGGGTCCTTCTCCTGTCACTGGTTATCACCCTTTACTGCAACAAACG
GGGCAGAAAGAAGCTCCTGTATATATTCAAACAACCATTTATGAGACCA
GTACAAACTACTCAAGAGGAAGATGGCTGTAGCTGCCGATTTCCAGAAG
AAGAAGAAGGAGGATGTGAACTGAGAGTGAAGTTCAGCAGGAGCGCAGA
GCCCCCCGCGTACCAGCAGGGCCAGAACCAGCTCTATAACGAGCTCAAT
CTAGGACGAAGAGAGGAGTACGATGTTTTGGACAAGAGACGTGGCCGGG
ACCCTGAGATGGGGGGAAAGCCGAGAAGGAAGAACCCTCAGGAAGGCCT
GTACAATGAACTGCAGAAAGATAAGATGGCGGAGGCCTACAGTGAGATT
GGGATGAAAGGCGAGCGCCGGAGGGGCAAGGGGCACGATGGCCTTTACC
AGGGTCTCAGTACAGCCACCAAGGACACCTACGACGCCCTTCACATGCA
GGCCCTGCCCCCTCGCTAACAGCCACTCGAGGATCCGGATTAGTCCAAT
TTGTTAAAGACAGGATATCAGTGGTCCAGGCTCTAGTTTTGACTCAACA
ATATCACCAGCTGAAGCCTATAGAGTACGAGCCATAGATAAAATAAAAG
ATTTTATTTAGTCTCCAGAAAAAGGGGGGAATGAAAGACCCCACCTGTA
GGTTTGGCAAGCTAGCTTAAGTAACGCCATTTTGCAAGGCATGGAAAAA
TACATAACTGAGAATAGAGAAGTTCAGATCAAGGTCAGGAACAGATGGA
ACAGCTGAATATGGGCCAAACAGGATATCTGTGGTAAGCAGTTCCTGCC
CCGGCTCAGGGCCAAGAACAGATGGAACAGCTGAATATGGGCCAAACAG
GATATCTGTGGTAAGCAGTTCCTGCCCCGGCTCAGGGCCAAGAACAGAT
GGTCCCCAGATGCGGTCCAGCCCTCAGCAGTTTCTAGAGAACCATCAGA
TGTTTCCAGGGTGCCCCAAGGACCTGAAATGACCCTGTGCCTTATTTGA
ACTAACCAATCAGTTCGCTTCTCGCTTCTGTTCGCGCGCTTCTGCTCCC
CGAGCTCAATAAAAGAGCCCACAACCCCTCACTCGGGGCGCCAGTCCTC
CGATTGACTGAGTCGCCCGGGTACCCGTGTATCCAATAAACCCTCTTGC
AGTTGCATCCGACTTGTGGTCTCGCTGTTCCTTGGGAGGGTCTCCTCTG
AGTGATTGACTACCCGTCAGCGGGGGTCTTTCACACATGCAGCATGTAT
CAAAATTAATTTGGTTTTTTTTCTTAAGTATTTACATTAAATGGCCATA
GTACTTAAAGTTACATTGGCTTCCTTGAAATAAACATGGAGTATTCAGA
ATGTGTCATAAATATTTCTAATTTTAAGATAGTATCTCCATTGGCTTTC
TACTTTTTCTTTTATTTTTTTTTGTCCTCTGTCTTCCATTTGTTGTTGT
TGTTGTTTGTTTGTTTGTTTGTTGGTTGGTTGGTTAATTTTTTTTTAAA
GATCCTACACTATAGTTCAAGCTAGACTATTAGCTACTCTGTAACCCAG
GGTGACCTTGAAGTCATGGGTAGCCTGCTGTTTTAGCCTTCCCACATCT
AAGATTACAGGTATGAGCTATCATTTTTGGTATATTGATTGATTGATTG
ATTGATGTGTGTGTGTGTGATTGTGTTTGTGTGTGTGACTGTGAAAATG
TGTGTATGGGTGTGTGTGAATGTGTGTATGTATGTGTGTGTGTGAGTGT
GTGTGTGTGTGTGTGCATGTGTGTGTGTGTGACTGTGTCTATGTGTATG
ACTGTGTGTGTGTGTGTGTGTGTGTGTGTGTGTGTGTGTGTGTGTGTGT
TGTGAAAAAATATTCTATGGTAGTGAGAGCCAACGCTCCGGCTCAGGTG
TCAGGTTGGTTTTTGAGACAGAGTCTTTCACTTAGCTTGGAATTCACTG
GCCGTCGTTTTACAACGTCGTGACTGGGAAAACCCTGGCGTTACCCAAC
TTAATCGCCTTGCAGCACATCCCCCTTTCGCCAGCTGGCGTAATAGCGA
AGAGGCCCGCACCGATCGCCCTTCCCAACAGTTGCGCAGCCTGAATGGC
GAATGGCGCCTGATGCGGTATTTTCTCCTTACGCATCTGTGCGGTATTT
CACACCGCATATGGTGCACTCTCAGTACAATCTGCTCTGATGCCGCATA
GTTAAGCCAGCCCCGACACCCGCCAACACCCGCTGACGCGCCCTGACGG
GCTTGTCTGCTCCCGGCATCCGCTTACAGACAAGCTGTGACCGTCTCCG
GGAGCTGCATGTGTCAGAGGTTTTCACCGTCATCACCGAAACGCGCGAT
GACGAAAGGGCCTCGTGATACGCCTATTTTTATAGGTTAATGTCATGAT
AATAATGGTTTCTTAGACGTCAGGTGGCACTTTTCGGGGAAATGTGCGC
GGAACCCCTATTTGTTTATTTTTCTAAATACATTCAAATATGTATCCGC
TCATGAGACAATAACCCTGATAAATGCTTCAATAATATTGAAAAAGGAA
GAGTATGAGTATTCAACATTTCCGTGTCGCCCTTATTCCCTTTTTTGCG
GCATTTTGCCTTCCTGTTTTTGCTCACCCAGAAACGCTGGTGAAAGTAA
AAGATGCTGAAGATCAGTTGGGTGCACGAGTGGGTTACATCGAACTGGA
TCTCAACAGCGGTAAGATCCTTGAGAGTTTTCGCCCCGAAGAACGTTTT
CCAATGATGAGCACTTTTAAAGTTCTGCTATGTGGCGCGGTATTATCCC
GTATTGACGCCGGGCAAGAGCAACTCGGTCGCCGCATACACTATTCTCA
GAATGACTTGGTTGAGTACTCACCAGTCACAGAAAAGCATCTTACGGAT
GGCATGACAGTAAGAGAATTATGCAGTGCTGCCATAACCATGAGTGATA
ACACTGCGGCCAACTTACTTCTGACAACGATCGGAGGACCGAAGGAGCT
AACCGCTTTTTTGCACAACATGGGGGATCATGTAACTCGCCTTGATCGT
TGGGAACCGGAGCTGAATGAAGCCATACCAAACGACGAGCGTGACACCA
CGATGCCTGTAGCAATGGCAACAACGTTGCGCAAACTATTAACTGGCGA
ACTACTTACTCTAGCTTCCCGGCAACAATTAATAGACTGGATGGAGGCG
GATAAAGTTGCAGGACCACTTCTGCGCTCGGCCCTTCCGGCTGGCTGGT
TTATTGCTGATAAATCTGGAGCCGGTGAGCGTGGGTCTCGCGGTATCAT
TGCAGCACTGGGGCCAGATGGTAAGCCCTCCCGTATCGTAGTTATCTAC
ACGACGGGGAGTCAGGCAACTATGGATGAACGAAATAGACAGATCGCTG
AGATAGGTGCCTCACTGATTAAGCATTGGTAACTGTCAGACCAAGTTTA
CTCATATATACTTTAGATTGATTTAAAACTTCATTTTTAATTTAAAAGG
ATCTAGGTGAAGATCCTTTTTGATAATCTCATGACCAAAATCCCTTAAC
GTGAGTTTTCGTTCCACTGAGCGTCAGACCCCGTAGAAAAGATCAAAGG
ATCTTCTTGAGATCCTTTTTTTCTGCGCGTAATCTGCTGCTTGCAAACA
AAAAAACCACCGCTACCAGCGGTGGTTTGTTTGCCGGATCAAGAGCTAC
CAACTCTTTTTCCGAAGGTAACTGGCTTCAGCAGAGCGCAGATACCAAA
TACTGTCCTTCTAGTGTAGCCGTAGTTAGGCCACCACTTCAAGAACTCT
GTAGCACCGCCTACATACCTCGCTCTGCTAATCCTGTTACCAGTGGCTG
CTGCCAGTGGCGATAAGTCGTGTCTTACCGGGTTGGACTCAAGACGATA
GTTACCGGATAAGGCGCAGCGGTCGGGCTGAACGGGGGGTTCGTGCACA
CAGCCCAGCTTGGAGCGAACGACCTACACCGAACTGAGATACCTACAGC
GTGAGCATTGAGAAAGCGCCACGCTTCCCGAAGGGAGAAAGGCGGACAG
GTATCCGGTAAGCGGCAGGGTCGGAACAGGAGAGCGCACGAGGGAGCTT
CCAGGGGGAAACGCCTGGTATCTTTATAGTCCTGTCGGGTTTCGCCACC
TCTGACTTGAGCGTCGATTTTTGTGATGCTCGTCAGGGGGGCGGAGCCT
ATGGAAAAACGCCAGCAACGCGGCCTTTTTACGGTTCCTGGCCTTTTGC
TGGCCTTTTGCTCACATGTTCTTTCCTGCGTTATCCCCTGATTCTGTGG
ATAACCGTATTACCGCCTTTGAGTGAGCTGATACCGCTCGCCGCAGCCG
AACGACCGAGCGCAGCGAGTCAGTGAGCGAGGAAGCGGAAGAGCGCCCA
ATACGCAAACCGCCTCTCCCCGCGCGTTGGCCGATTCATTAATGCAGCT
GGCACGACAGGTTTCCCGACTGGAAAGCGGGCAGTGAGCGCAACGCAAT
TAATGTGAGTTAGCTCACTCATTAGGCACCCCAGGCTTTACACTTTATG
CTTCCGGCTCGTATGTTGTGTGGAATTGTGAGCGGATAACAATTTCACA
CAGGAAACAGCTATGACCATGATTACGCCAAGCTTTGCTCTTAGGAGTT
TCCTAATACATCCCAAACTCAAATATATAAAGCATTTGACTTGTTCTAT
GCCCTAGGGGGCGGGGGGAAGCTAAGCCAGCTTTTTTTAACATTTAAAA
TGTTAATTCCATTTTAAATGCACAGATGTTTTTATTTCATAAGGGTTTC
AATGTGCATGAATGCTGCAATATTCCTGTTACCAAAGCTAGTATAAATA
AAAATAGATAAACGTGGAAATTACTTAGAGTTTCTGTCATTAACGTTTC
CTTCCTCAGTTGACAACATAAATGCGCTGCTGAGCAAGCCAGTTTGCAT
CTGTCAGGATCAATTTCCCATTATGCCAGTCATATTAATTACTAGTCAA
TTAGTTGATTTTTATTTTTGACATATACATGTGAATGAAAGACCCCACC
TGTAGGTTTGGCAAGCTAGCTTAAGTAACGCCATTTTGCAAGGCATGGA
AAAATACATAACTGAGAATAGAAAAGTTCAGATCAAGGTCAGGAACAGA
TGGAACAGCTGAATATGGGCCAAACAGGATATCTGTGGTAAGCAGTTCC
TGCCCCGGCTCAGGGCCAAGAACAGATGGAACAGCTGAATATGGGCCAA
ACAGGATATCTGTGGTAAGCAGTTCCTGCCCCGGCTCAGGGCCAAGAAC
AGATGGTCCCCAGATGCGGTCCAGCCCTCAGCAGTTTCTAGAGAACCAT
CAGATGTTTCCAGGGTGCCCCAAGGACCTGAAATGACCCTGTGCCTTAT
TTGAACTAACCAATCAGTTCGCTTCTCGCTTCTGTTCGCGCGCTTATGC
TCCCCGAGCTCAATAAAAGAGCCCACAACCCCTCACTCGGGGCGCCAGT
CCTCCGATTGACTGAGTCGCCCGGGTACCCGTGTATCCAATAAACCCTC
TTGCAGTTGCATCCGACTTGTGGTCTCGCTGTTCCTTGGGAGGGTCTCC
TCTGAGTGATTGACTACCCGTCAGCGGGGGTCTTTCATTTGGGGGCTCG
TCCGGGATCGGGAGACCCCTGCCCAGGGACCACCGACCCACCACCGGGA
GGTAAGCTGGCCAGCAACTTATCTGTGTCTGTCCGATTGTCTAGTGTCT
ATGACTGATTTTATGCGCCTGCGTCGGTACTAGTTAGCTAACTAGCTCT
GTATCTGGCGGACCCGTGGTGGAACTGACGAGTTCGGAACACCCGGCCG
CAACCCTGGGAGACGTCCCAGGGACTTCGGGGGCCGTTTTTGTGGCCCG
ACCTGAGTCCTAAAATCCCGATCGTTTAGGACTCTTTGGTGCACCCCCC
TTAGAGGAGGGATATGTGGTTCTGGTAGGAGACGAGAACCTAAAACAGT
TCCCGCCTCCGTCTGAATTTTTGCTTTCGGTTTGGGACCGAAGCCGCGC
CGCGCGTCTTGTCTGCTGCAGCATCGTTCTGTGTTGTCTCTGTCTGACT
GTGTTTCTGTATTTGTCTGAAAATATGGGCCCGGGCTAGACTGTTACCA
CTCCCTTAAGTTTGACCTTAGGTCACTGGAAAGATGTCGAGCGGATCGC
TCACAACCAGTCGGTAGATGTCAAGAAGAGACGTTGGGTTACCTTCTGC
TCTGCAGAATGGCCAACCTTTAACGTCGGATGGCCGCGAGACGGCACCT
TTAACCGAGACCTCATCACCCAGGTTAAGATCAAGGTCTTTTCACCTGG
CCCGCATGGACACCCAGACCAGGTCCCCTACATCGTGACCTGGGAAGCC
TTGGCTTTTGACCCCCCTCCCTGGGTCAAGCCCTTTGTACACCCTAAGC
CTCCGCCTCCTCTTCCTCCATCCGCCCCGTCTCTCCCCCTTGAACCTCC
TCGTTCGACCCCGCCTCGATCCTCCCTTTATCCAGCCCTCACTCCTTCT
CTAGGCGCCCCCATATGGCCATATGAGATCTTATATGGGGCACCCCCGC
CCCTTGTAAACTTCCCTGACCCTGACATGACAAGAGTTACTAACAGCCC
CTCTCTCCAAGCTCACTTACAGGCTCTCTACTTAGTCCAGCACGAAGTC
TGGAGACCTCTGGCGGCAGCCTACCAAGAACAACTGGACCGA.

The isolated nucleic acid molecule having the nucleotide sequence of SEQ ID NO:953 encodes a FcRL-5-targeted CAR (designated as 31 FcRL5-targeted BBz CAR) comprising a fully human scFv (encoded by nucleotides 207-998 of SEQ ID NO:953) that comprises a heavy chain variable region comprising amino acids having the sequence set forth in SEQ ID NO:116, a light chain variable region comprising amino acids having the sequence set forth in SEQ ID NO:115, and a linker having an amino acid sequence of SEQ ID NO:307 positioned between the heavy chain variable region and the light chain variable region, a transmembrane domain comprising a CD8 polypeptide having 137 to 207 of SEQ ID NO: 960, and an intracellular domain comprising a CD3 polypeptide comprising amino acids 52 to 163 of SEQ ID NO: 941, and a co-stimulatory signaling region comprising a 4-1BB polypeptide having amino acids 214-255 of SEQ ID NO: 943. Nucleotides 270-998 of SEQ ID NO: 953 encodes the human scFv. Nucleotides 1008-1220 of SEQ ID NO: 953 encodes the CD8 polypeptide comprised in the transmembrane domain. Nucleotides 1221-1346 of SEQ ID NO: 953 encodes the 4-1BB polypeptide comprised in the intracellular domain. Nucleotides 1347-1685 of SEQ ID NO: 953 encodes the CD3zeta polypeptide comprised in the intracellular domain. Other portions of SEQ ID NO: 953 are shown in Table 232.

TABLE 232

| | Nucleotide Sequence Positions | Number of |
|---|---|---|
| Portions | of SEQ ID NO: 953 | Nucleotides |
| anti-FcRL5 scFv 31 | 207 . . . 998 | 792 |
| CD8a TM | 1008 . . . 1220 | 213 |
| 4-1BB | 1221 . . . 1346 | 126 |
| CD3zeta | 1347 . . . 1685 | 339 |
| LTR | 1965 . . . 2434 | 470 |
| M13 fwd | 3133 . . . 3149 | 17 |
| AmpR promoter | 3624 . . . 3728 | 105 |
| AmpR | 3729 . . . 4589 | 861 |
| ori | 4760 . . . 5348 | 589 |
| CAP binding site | 5636 . . . 5657 | 22 |
| lac promoter | 5672 . . . 5702 | 31 |
| lac operator | 5710 . . . 5726 | 17 |
| M13 rev | 5734 . . . 5750 | 17 |
| LTR | 6159 . . . 6752 | 594 |
| MMLV Psi | 6815 . . . 7172 | 358 |
| gag (truncated) | 7237 . . . 7653 | 417 |

[0352] In certain embodiments, the isolated nucleic acid molecule comprises nucleic acids having the sequence set forth in SEQ ID NO:954 provided below:

[SEQ ID NO: 954]
CCGGTGGTACCTCACCCTTACCGAGTCGGCGACACAGTGTGGGTCCGCCGACACCAGACTAAGAACCTAGAACCTCGCTG
GAAAGGACCTTACACAGTCCTGCTGACCACCCCCACCGCCCTCAAAGTAGACGGCATCGCAGCTTGGATACACGCCGCCC
ACGTGAAGGCTGCCGACCCCGGGGGTGGACCATCCTCTAGACTGCCATGGAAACCGATACACTGCTGCTGTGGGTGCTGC
TGCTGTGGGTGCCAGGATCCACAGGCAATTTTATGCTGACTCAGCCCCACTCTGTGTCGGAGTCTCCGGGGAAGACGGTA
ACCATCTCCTGCACCCGCAGCAGTGGCAGCATTGCCAGCAACTATGTGCAGTGGTACCAGCAGCGCCCGGGCAGTTCCCC
CACCACTGTGATCTATGAGGATAACCAAAGACCCTCTGGGGTCCCTGATCGGTTCTCTGGCTCCATCGACAGCTCCTCCA
ACTCTGCCTCCCTCACCATCTCTGGACTGAAGACTGAGGACGAGGCTGACTACTACTGTCAGTCTTATGATAGCAGCAAT
TGGGTGTTCGGCGGAGGGACCAAGCTGACCGTCCTAGGTTCTAGAGGTGGTGGTGGTAGCGGCGGCGGCGGCTCTGGTGG
TGGTGGATCCCTCGAGATGGCCGAGGTCCAGCTGGTGCAGTCTGGGGCTGAGGTGAAGAAGCCTGGGTCCTCGGTGAAGG
TCTCCTGCAAGGCTTCTGGAGGCACCTTCAGCAGCTATGCTATCAGCTGGGTGCGACAGGCCCCTGGACAAGGGCTTGAG
TGGATGGGAGGGATCATCCCTATCTTTGGTACAGCAAACTACGCACAGAAGTTCCAGGGCAGAGTCACGATTACCGCGGA
CGAATCCACGAGCACAGCCTACATGGAGCTGAGCAGCCTGAGATCTGAGGACACGGCCGTGTATTACTGTGCGCGCTCTA
ACTACTACTACAACGATTACTGGGGTCAAGGTACTCTGGTGACCGTCTCCTCAGCGGCCGCACCCACCACGACGCCAGCG
CCGCGACCACCAACCCCGGCGCCCACGATCGCGTCGCAGCCCCTGTCCCTGCGCCCAGAGGCGTGCCGGCCAGCGGCGGG
GGGCGCAGTGCACACGAGGGGGCTGGACTTCGCCTGTGATATCTACATCTGGGCGCCCCTGGCCGGGACTTGTGGGGTCC
TTCTCCTGTCACTGGTTATCACCCTTTACTGCAACAAACGGGGCAGAAAGAAGCTCCTGTATATATTCAAACAACCATTT
ATGAGACCAGTACAAACTACTCAAGAGGAAGATGGCTGTAGCTGCCGATTTCCAGAAGAAGAAGAAGGAGGATGTGAACT
GAGAGTGAAGTTCAGCAGGAGCGCAGAGCCCCCCGCGTACCAGCAGGGCCAGAACCAGCTCTATAACGAGCTCAATCTAG
GACGAAGAGAGGAGTACGATGTTTTGGACAAGAGACGTGGCCGGGACCCTGAGATGGGGGGAAAGCCGAGAAGGAAGAAC
CCTCAGGAAGGCCTGTACAATGAACTGCAGAAAGATAAGATGGCGGAGGCCTACAGTGAGATTGGGATGAAAGGCGAGCG
CCGGAGGGGCAAGGGGCACGATGGCCTTTACCAGGGTCTCAGTACAGCCACCAAGGACACCTACGACGCCCTTCACATGC
AGGCCCTGCCCCCTCGCTAACAGCCACTCGAGGATCCGGATTAGTCCAATTTGTTAAAGACAGGATATCAGTGGTCCAGG
CTCTAGTTTTGACTCAACAATATCACCAGCTGAAGCCTATAGAGTACGAGCCATAGATAAAATAAAAGATTTTATTTAGT
CTCCAGAAAAAGGGGGGAATGAAAGACCCCACCTGTAGGTTTGGCAAGCTAGCTTAAGTAACGCCATTTTGCAAGGCATG
GAAAAATACATAACTGAGAATAGAGAAGTTCAGATCAAGGTCAGGAACAGATGGAACAGCTGAATATGGGCCAAACAGGA
TATCTGTGGTAAGCAGTTCCTGCCCCGGCTCAGGGCCAAGAACAGATGGAACAGCTGAATATGGGCCAAACAGGATATCT
GTGGTAAGCAGTTCCTGCCCCGGCTCAGGGCCAAGAACAGATGGTCCCCAGATGCGGTCCAGCCCTCAGCAGTTTCTAGA
GAACCATCAGATGTTTCCAGGGTGCCCCAAGGACCTGAAATGACCCTGTGCCTTATTTGAACTAACCAATCAGTTCGCTT
CTCGCTTCTGTTCGCGCGCTTCTGCTCCCCGAGCTCAATAAAAGAGCCCACAACCCCTCACTCGGGGCGCCAGTCCTCCG
ATTGACTGAGTCGCCCGGGTACCCGTGTATCCAATAAACCCTCTTGCAGTTGCATCCGACTTGTGGTCTCGCTGTTCCTT
GGGAGGGTCTCCTCTGAGTGATTGACTACCCGTCAGCGGGGGTCTTTCACACATGCAGCATGTATCAAAATTAATTTGGT
TTTTTTTCTTAAGTATTTACATTAAATGGCCATAGTACTTAAAGTTACATTGGCTTCCTTGAAATAAACATGGAGTATTC
AGAATGTGTCATAAATATTTCTAATTTTAAGATAGTATCTCCATTGGCTTTCTACTTTTTCTTTTATTTTTTTTTGTCCT
CTGTCTTCCATTTGTTGTTGTTGTTGTTTGTTTGTTTGTTTGTTGGTTGGTTGGTTAATTTTTTTTTAAAGATCCTACAC
TATAGTTCAAGCTAGACTATTAGCTACTCTGTAACCCAGGGTGACCTTGAAGTCATGGGTAGCCTGCTGTTTTAGCCTTC
CCACATCTAAGATTACAGGTATGAGCTATCATTTTTGGTATATTGATTGATTGATTGATTGATGTGTGTGTGTGTGATTG
TGTTTGTGTGTGTGACTGTGAAAATGTGTGTATGGGTGTGTGTGAATGTGTGTATGTATGTGTGTGTGTGAGTGTGTGTG
TGTGTGTGTGCATGTGTGTGTGTGTGACTGTGTCTATGTGTATGACTGTGTGTGTGTGTGTGTGTGTGTGTGTGTGTGTG
TGTGTGTGTGTGTTGTGAAAAAATATTCTATGGTAGTGAGAGCCAACGCTCCGGCTCAGGTGTCAGGTTGGTTTTTGAGA
CAGAGTCTTTCACTTAGCTTGGAATTCACTGGCCGTCGTTTTACAACGTCGTGACTGGGAAAACCCTGGCGTTACCCAAC
TTAATCGCCTTGCAGCACATCCCCCTTTCGCCAGCTGGCGTAATAGCGAAGAGGCCCGCACCGATCGCCCTTCCCAACAG
TTGCGCAGCCTGAATGGCGAATGGCGCCTGATGCGGTATTTTCTCCTTACGCATCTGTGCGGTATTTCACACCGCATATG
GTGCACTCTCAGTACAATCTGCTCTGATGCCGCATAGTTAAGCCAGCCCCGACACCCGCCAACACCCGCTGACGCGCCCT
GACGGGCTTGTCTGCTCCCGGCATCCGCTTACAGACAAGCTGTGACCGTCTCCGGGAGCTGCATGTGTCAGAGGTTTTCA
CCGTCATCACCGAAACGCGCGATGACGAAAGGGCCTCGTGATACGCCTATTTTTATAGGTTAATGTCATGATAATAATGG
TTTCTTAGACGTCAGGTGGCACTTTTCGGGGAAATGTGCGCGGAACCCCTATTTGTTTATTTTTCTAAATACATTCAAAT
ATGTATCCGCTCATGAGACAATAACCCTGATAAATGCTTCAATAATATTGAAAAAGGAAGAGTATGAGTATTCAACATTT
CCGTGTCGCCCTTATTCCCTTTTTTGCGGCATTTTGCCTTCCTGTTTTTGCTCACCCAGAAACGCTGGTGAAAGTAAAAG
ATGCTGAAGATCAGTTGGGTGCACGAGTGGGTTACATCGAACTGGATCTCAACAGCGGTAAGATCCTTGAGAGTTTTCGC
CCCGAAGAACGTTTTCCAATGATGAGCACTTTTAAAGTTCTGCTATGTGGCGCGGTATTATCCCGTATTGACGCCGGGCA
AGAGCAACTCGGTCGCCGCATACACTATTCTCAGAATGACTTGGTTGAGTACTCACCAGTCACAGAAAAGCATCTTACGG
ATGGCATGACAGTAAGAGAATTATGCAGTGCTGCCATAACCATGAGTGATAACACTGCGGCCAACTTACTTCTGACAACG
ATCGGAGGACCGAAGGAGCTAACCGCTTTTTTGCACAACATGGGGGATCATGTAACTCGCCTTGATCGTTGGGAACCGGA
GCTGAATGAAGCCATACCAAACGACGAGCGTGACACCACGATGCCTGTAGCAATGGCAACAACGTTGCGCAAACTATTAA
CTGGCGAACTACTTACTCTAGCTTCCCGGCAACAATTAATAGACTGGATGGAGGCGGATAAAGTTGCAGGACCACTTCTG
CGCTCGGCCCTTCCGGCTGGCTGGTTTATTGCTGATAAATCTGGAGCCGGTGAGCGTGGGTCTCGCGGTATCATTGCAGC
ACTGGGGCCAGATGGTAAGCCCTCCCGTATCGTAGTTATCTACACGACGGGGAGTCAGGCAACTATGGATGAACGAAATA
GACAGATCGCTGAGATAGGTGCCTCACTGATTAAGCATTGGTAACTGTCAGACCAAGTTTACTCATATATACTTTAGATT
GATTTAAAACTTCATTTTTAATTTAAAAGGATCTAGGTGAAGATCCTTTTTGATAATCTCATGACCAAAATCCCTTAACG
TGAGTTTTCGTTCCACTGAGCGTCAGACCCCGTAGAAAAGATCAAAGGATCTTCTTGAGATCCTTTTTTTCTGCGCGTAA
TCTGCTGCTTGCAAACAAAAAAACCACCGCTACCAGCGGTGGTTTGTTTGCCGGATCAAGAGCTACCAACTCTTTTTCCG
AAGGTAACTGGCTTCAGCAGAGCGCAGATACCAAATACTGTCCTTCTAGTGTAGCCGTAGTTAGGCCACCACTTCAAGAA
CTCTGTAGCACCGCCTACATACCTCGCTCTGCTAATCCTGTTACCAGTGGCTGCTGCCAGTGGCGATAAGTCGTGTCTTA
CCGGGTTGGACTCAAGACGATAGTTACCGGATAAGGCGCAGCGGTCGGGCTGAACGGGGGGTTCGTGCACACAGCCCAGC
TTGGAGCGAACGACCTACACCGAACTGAGATACCTACAGCGTGAGCATTGAGAAAGCGCCACGCTTCCCGAAGGGAGAAA
GGCGGACAGGTATCCGGTAAGCGGCAGGGTCGGAACAGGAGAGCGCACGAGGGAGCTTCCAGGGGGAAACGCCTGGTATC
TTTATAGTCCTGTCGGGTTTCGCCACCTCTGACTTGAGCGTCGATTTTTGTGATGCTCGTCAGGGGGGCGGAGCCTATGG
AAAAACGCCAGCAACGCGGCCTTTTTACGGTTCCTGGCCTTTTGCTGGCCTTTTGCTCACATGTTCTTTCCTGCGTTATC
CCCTGATTCTGTGGATAACCGTATTACCGCCTTTGAGTGAGCTGATACCGCTCGCCGCAGCCGAACGACCGAGCGCAGCG
AGTCAGTGAGCGAGGAAGCGGAAGAGCGCCCAATACGCAAACCGCCTCTCCCCGCGCGTTGGCCGATTCATTAATGCAGC
TGGCACGACAGGTTTCCCGACTGGAAAGCGGGCAGTGAGCGCAACGCAATTAATGTGAGTTAGCTCACTCATTAGGCACC
CCAGGCTTTACACTTTATGCTTCCGGCTCGTATGTTGTGTGGAATTGTGAGCGGATAACAATTTCACACAGGAAACAGCT
ATGACCATGATTACGCCAAGCTTTGCTCTTAGGAGTTTCCTAATACATCCCAAACTCAAATATATAAAGCATTTGACTTG
TTCTATGCCCTAGGGGGCGGGGGGAAGCTAAGCCAGCTTTTTTTAACATTTAAAATGTTAATTCCATTTTAAATGCACAG
ATGTTTTTATTTCATAAGGGTTTCAATGTGCATGAATGCTGCAATATTCCTGTTACCAAAGCTAGTATAAATAAAAATAG
ATAAACGTGGAAATTACTTAGAGTTTCTGTCATTAACGTTTCCTTCCTCAGTTGACAACATAAATGCGCTGCTGAGCAAG
CCAGTTTGCATCTGTCAGGATCAATTTCCCATTATGCCAGTCATATTAATTACTAGTCAATTAGTTGATTTTTATTTTTG
ACATATACATGTGAATGAAAGACCCCACCTGTAGGTTTGGCAAGCTAGCTTAAGTAACGCCATTTTGCAAGGCATGGAAA
AATACATAACTGAGAATAGAAAAGTTCAGATCAAGGTCAGGAACAGATGGAACAGCTGAATATGGGCCAAACAGGATATC
TGTGGTAAGCAGTTCCTGCCCCGGCTCAGGGCCAAGAACAGATGGAACAGCTGAATATGGGCCAAACAGGATATCTGTGG
TAAGCAGTTCCTGCCCCGGCTCAGGGCCAAGAACAGATGGTCCCCAGATGCGGTCCAGCCCTCAGCAGTTTCTAGAGAAC
CATCAGATGTTTCCAGGGTGCCCCAAGGACCTGAAATGACCCTGTGCCTTATTTGAACTAACCAATCAGTTCGCTTCTCG
CTTCTGTTCGCGCGCTTATGCTCCCCGAGCTCAATAAAAGAGCCCACAACCCCTCACTCGGGGCGCCAGTCCTCCGATTG
ACTGAGTCGCCCGGGTACCCGTGTATCCAATAAACCCTCTTGCAGTTGCATCCGACTTGTGGTCTCGCTGTTCCTTGGGA
GGGTCTCCTCTGAGTGATTGACTACCCGTCAGCGGGGGTCTTTCATTTGGGGGCTCGTCCGGGATCGGGAGACCCCTGCC
CAGGGACCACCGACCCACCACCGGGAGGTAAGCTGGCCAGCAACTTATCTGTGTCTGTCCGATTGTCTAGTGTCTATGAC
TGATTTTATGCGCCTGCGTCGGTACTAGTTAGCTAACTAGCTCTGTATCTGGCGGACCCGTGGTGGAACTGACGAGTTCG
GAACACCCGGCCGCAACCCTGGGAGACGTCCCAGGGACTTCGGGGGCCGTTTTTGTGGCCCGACCTGAGTCCTAAAATCC
CGATCGTTTAGGACTCTTTGGTGCACCCCCCTTAGAGGAGGGATATGTGGTTCTGGTAGGAGACGAGAACCTAAAACAGT
TCCCGCCTCCGTCTGAATTTTTGCTTTCGGTTTGGGACCGAAGCCGCGCCGCGCGTCTTGTCTGCTGCAGCATCGTTCTG
TGTTGTCTCTGTCTGACTGTGTTTCTGTATTTGTCTGAAAATATGGGCCCGGGCTAGACTGTTACCACTCCCTTAAGTTT
GACCTTAGGTCACTGGAAAGATGTCGAGCGGATCGCTCACAACCAGTCGGTAGATGTCAAGAAGAGACGTTGGGTTACCT
TCTGCTCTGCAGAATGGCCAACCTTTAACGTCGGATGGCCGCGAGACGGCACCTTTAACCGAGACCTCATCACCCAGGTT
AAGATCAAGGTCTTTTCACCTGGCCCGCATGGACACCCAGACCAGGTCCCCTACATCGTGACCTGGGAAGCCTTGGCTTT
TGACCCCCCTCCCTGGGTCAAGCCCTTTGTACACCCTAAGCCTCCGCCTCCTCTTCCTCCATCCGCCCCGTCTCTCCCCC
TTGAACCTCCTCGTTCGACCCCGCCTCGATCCTCCCTTTATCCAGCCCTCACTCCTTCTCTAGGCGCCCCCATATGGCCA
TATGAGATCTTATATGGGGCACCCCCGCCCCTTGTAAACTTCCCTGACCCTGACATGACAAGAGTTACTAACAGCCCCTC
TCTCCAAGCTCACTTACAGGCTCTCTACTTAGTCCAGCACGAAGTCTGGAGACCTCTGGCGGCAGCCTACCAAGAACAAC
TGGACCGA.

[0353] The isolated nucleic acid molecule having the nucleotide sequence of SEQ ID NO:954 encodes a FcRL-5-targeted CAR (designated as 39 FcRL5-targeted BBz CAR) comprising a fully human scFv (encoded by nucleotides 207-1013 of SEQ ID NO:954) that comprises a heavy chain variable region comprising amino acids having the sequence set forth in SEQ ID NO:144, a light chain variable region comprising amino acids having the sequence set forth in SEQ ID NO:143, and a linker having an amino acid sequence of SEQ ID NO:307 positioned between the heavy chain variable region and the light chain variable region, a transmembrane domain comprising a CD8 polypeptide having 137 to 207 of SEQ ID NO: 960, and an intracellular domain comprising a CD3 polypeptide comprising amino acids 52 to 163 of SEQ ID NO: 941, and a co-stimulatory signaling region comprising a 4-1BB polypeptide having amino acids 214-255 of SEQ ID NO: 943. Nucleotides 207-1013 of SEQ ID NO: 954 encodes the human scFv. Nucleotides 1023-1235 of SEQ ID NO: 954 encodes the CD8 polypeptide comprised in the transmembrane domain. Nucleotides 1236-1361 of SEQ ID NO: 954 encodes the 4-1BB polypeptide comprised in the intracellular domain. Nucleotides 1362-1700 of SEQ ID NO: 954 encodes the CD3zeta polypeptide comprised in the intracellular domain. Other portions of SEQ ID NO: 954 are shown in Table 233.

TABLE 233

| | Nucleotide Sequence | |
|---|---|---|
| | Positions of SEQ ID NO: | |
| Portions | 954 | Number of Nucleotides |
| anti-FcRL5 scFv 39 | 207 . . . 1013 | 807 |
| CD8a TM | 1023 . . . 1235 | 213 |
| 4-1BB | 1236 . . . 1361 | 126 |
| CD3zeta | 1362 . . . 1700 | 339 |
| LTR | 1980 . . . 2449 | 470 |
| M13 fwd | 3148 . . . 3164 | 17 |
| AmpR promoter | 3639 . . . 3743 | 105 |
| AmpR | 3744 . . . 4604 | 861 |
| ori | 4775 . . . 5363 | 589 |
| CAP binding site | 5651 . . . 5672 | 22 |
| lac promoter | 5687 . . . 5717 | 31 |
| lac operator | 5725 . . . 5741 | 17 |
| M13 rev | 5749 . . . 5765 | 17 |
| LTR | 6174 . . . 6767 | 594 |
| MMLV Psi | 6830 . . . 7187 | 358 |
| gag (truncated) | 7252 . . . 7668 | 417 |

[0354] In certain embodiments, the isolated nucleic acid molecule comprises nucleic acids having the sequence set forth in SEQ ID NO:955 provided below:

[SEQ ID NO: 955]
CCGGTGGTACCTCACCCTTACCGAGTCGGCGACACAGTGTGGGTCCGCCGACACCAGACTAAGAACCTAGAACCTCGCTG
GAAAGGACCTTACACAGTCCTGCTGACCACCCCCACCGCCCTCAAAGTAGACGGCATCGCAGCTTGGATACACGCCGCCC
ACGTGAAGGCTGCCGACCCCGGGGGTGGACCATCCTCTAGACTGCCATGGAAACCGACACCCTGCTGCTGTGGGTGCTGC
TGCTGTGGGTGCCAGGATCCACAGGACAGTCTGTCGTGACGCAGCCACCCTCAGCGTCTGGGACCCCCGGGCAGAGGGTC
ACCATCTCTTGTTCTGGAAGCAGCTCCAACATCGGAAGTAATTATGTATACTGGTACCAGCAGCTCCCAGGAACGGCCCC
CAAACTCCTCATCTATAGTAATAATCAGCGGCCCTCAGGGGTCCCTGACCGATTCTCTGGCTCCAAGTCTGGCACCTCAG
CCTCCCTGGCCATCAGTGGGCTCCGGTCCGAGGATGAGGCTGATTATTACTGTGCAGCATGGGATGACAGCCTGAGTGGT
TATGTCTTCGGAACTGGGACCAAGCTGACCGTCCTAGGTTCTAGAGGTGGTGGTGGTAGCGGCGGCGGCGGCTCTGGTGG
TGGTGGATCCCTCGAGATGGCCCAGGTGCAGCTACAGCAGTGGGGCGCAGGACTGTTGAAGCCTTCGGAGACCCTGTCCC
TCACCTGCGCTGTCTATGGTGGGTCCTTCAGTGGTTACTACTGGAGCTGGATCCGCCAGCCCCCAGGGAAGGGGCTGGAG
TGGATTGGGGAAATCAATCATAGTGGAAGCACCAACTACAACCCGTCCCTCAAGAGTCGAGTCACCATATCAGTAGACAC
GTCCAAGAACCAGTTCTCCCTGAAGCTGAGCTCTGTGACCGCCGCGGACACGGCCGTGTATTACTGTGCGCGCCTGTACG
AAGGTGGTTACCATGGTTGGGGTTCTTGGCTGTCTTCTGATTCTTGGGGTCAAGGTACTCTGGTGACCGTCTCCTCAGCG
GCCGCACCCACCACGACGCCAGCGCCGCGACCACCAACCCCGGCGCCCACGATCGCGTCGCAGCCCCTGTCCCTGCGCCC
AGAGGCGTGCCGGCCAGCGGCGGGGGGCGCAGTGCACACGAGGGGGCTGGACTTCGCCTGTGATATCTACATCTGGGCGC
CCCTGGCCGGGACTTGTGGGGTCCTTCTCCTGTCACTGGTTATCACCCTTTACTGCAACAAACGGGGCAGAAAGAAGCTC
CTGTATATATTCAAACAACCATTTATGAGACCAGTACAAACTACTCAAGAGGAAGATGGCTGTAGCTGCCGATTTCCAGA
AGAAGAAGAAGGAGGATGTGAACTGAGAGTGAAGTTCAGCAGGAGCGCAGAGCCCCCCGCGTACCAGCAGGGCCAGAACC
AGCTCTATAACGAGCTCAATCTAGGACGAAGAGAGGAGTACGATGTTTTGGACAAGAGACGTGGCCGGGACCCTGAGATG
GGGGGAAAGCCGAGAAGGAAGAACCCTCAGGAAGGCCTGTACAATGAACTGCAGAAAGATAAGATGGCGGAGGCCTACAG
TGAGATTGGGATGAAAGGCGAGCGCCGGAGGGGCAAGGGGCACGATGGCCTTTACCAGGGTCTCAGTACAGCCACCAAGG
ACACCTACGACGCCCTTCACATGCAGGCCCTGCCCCCTCGCTAACAGCCACTCGAGGATCCGGATTAGTCCAATTTGTTA
AAGACAGGATATCAGTGGTCCAGGCTCTAGTTTTGACTCAACAATATCACCAGCTGAAGCCTATAGAGTACGAGCCATAG
ATAAAATAAAAGATTTTATTTAGTCTCCAGAAAAAGGGGGGAATGAAAGACCCCACCTGTAGGTTTGGCAAGCTAGCTTA
AGTAACGCCATTTTGCAAGGCATGGAAAAATACATAACTGAGAATAGAGAAGTTCAGATCAAGGTCAGGAACAGATGGAA
CAGCTGAATATGGGCCAAACAGGATATCTGTGGTAAGCAGTTCCTGCCCCGGCTCAGGGCCAAGAACAGATGGAACAGCT
GAATATGGGCCAAACAGGATATCTGTGGTAAGCAGTTCCTGCCCCGGCTCAGGGCCAAGAACAGATGGTCCCCAGATGCG
GTCCAGCCCTCAGCAGTTTCTAGAGAACCATCAGATGTTTCCAGGGTGCCCCAAGGACCTGAAATGACCCTGTGCCTTAT
TTGAACTAACCAATCAGTTCGCTTCTCGCTTCTGTTCGCGCGCTTCTGCTCCCCGAGCTCAATAAAAGAGCCCACAACCC
CTCACTCGGGGCGCCAGTCCTCCGATTGACTGAGTCGCCCGGGTACCCGTGTATCCAATAAACCCTCTTGCAGTTGCATC
CGACTTGTGGTCTCGCTGTTCCTTGGGAGGGTCTCCTCTGAGTGATTGACTACCCGTCAGCGGGGGTCTTTCACACATGC
AGCATGTATCAAAATTAATTTGGTTTTTTTTCTTAAGTATTTACATTAAATGGCCATAGTACTTAAAGTTACATTGGCTT
CCTTGAAATAAACATGGAGTATTCAGAATGTGTCATAAATATTTCTAATTTTAAGATAGTATCTCCATTGGCTTTCTACT
TTTTCTTTTATTTTTTTTTGTCCTCTGTCTTCCATTTGTTGTTGTTGTTGTTTGTTTGTTTGTTTGTTGGTTGGTTGGTT
AATTTTTTTTTAAAGATCCTACACTATAGTTCAAGCTAGACTATTAGCTACTCTGTAACCCAGGGTGACCTTGAAGTCAT
GGGTAGCCTGCTGTTTTAGCCTTCCCACATCTAAGATTACAGGTATGAGCTATCATTTTTGGTATATTGATTGATTGATT
GATTGATGTGTGTGTGTGTGATTGTGTTTGTGTGTGTGACTGTGAAAATGTGTGTATGGGTGTGTGTGAATGTGTGTATG
TATGTGTGTGTGTGAGTGTGTGTGTGTGTGTGTGCATGTGTGTGTGTGTGACTGTGTCTATGTGTATGACTGTGTGTGTG
TGTGTGTGTGTGTGTGTGTGTGTGTGTGTGTGTGTGTTGTGAAAAAATATTCTATGGTAGTGAGAGCCAACGCTCCGGCT
CAGGTGTCAGGTTGGTTTTTGAGACAGAGTCTTTCACTTAGCTTGGAATTCACTGGCCGTCGTTTTACAACGTCGTGACT
GGGAAAACCCTGGCGTTACCCAACTTAATCGCCTTGCAGCACATCCCCCTTTCGCCAGCTGGCGTAATAGCGAAGAGGCC
CGCACCGATCGCCCTTCCCAACAGTTGCGCAGCCTGAATGGCGAATGGCGCCTGATGCGGTATTTTCTCCTTACGCATCT
GTGCGGTATTTCACACCGCATATGGTGCACTCTCAGTACAATCTGCTCTGATGCCGCATAGTTAAGCCAGCCCCGACACC
CGCCAACACCCGCTGACGCGCCCTGACGGGCTTGTCTGCTCCCGGCATCCGCTTACAGACAAGCTGTGACCGTCTCCGGG
AGCTGCATGTGTCAGAGGTTTTCACCGTCATCACCGAAACGCGCGATGACGAAAGGGCCTCGTGATACGCCTATTTTTAT
AGGTTAATGTCATGATAATAATGGTTTCTTAGACGTCAGGTGGCACTTTTCGGGGAAATGTGCGCGGAACCCCTATTTGT
TTATTTTTCTAAATACATTCAAATATGTATCCGCTCATGAGACAATAACCCTGATAAATGCTTCAATAATATTGAAAAAG
GAAGAGTATGAGTATTCAACATTTCCGTGTCGCCCTTATTCCCTTTTTTGCGGCATTTTGCCTTCCTGTTTTTGCTCACC
CAGAAACGCTGGTGAAAGTAAAAGATGCTGAAGATCAGTTGGGTGCACGAGTGGGTTACATCGAACTGGATCTCAACAGC
GGTAAGATCCTTGAGAGTTTTCGCCCCGAAGAACGTTTTCCAATGATGAGCACTTTTAAAGTTCTGCTATGTGGCGCGGT
ATTATCCCGTATTGACGCCGGGCAAGAGCAACTCGGTCGCCGCATACACTATTCTCAGAATGACTTGGTTGAGTACTCAC
CAGTCACAGAAAAGCATCTTACGGATGGCATGACAGTAAGAGAATTATGCAGTGCTGCCATAACCATGAGTGATAACACT
GCGGCCAACTTACTTCTGACAACGATCGGAGGACCGAAGGAGCTAACCGCTTTTTTGCACAACATGGGGGATCATGTAAC
TCGCCTTGATCGTTGGGAACCGGAGCTGAATGAAGCCATACCAAACGACGAGCGTGACACCACGATGCCTGTAGCAATGG
CAACAACGTTGCGCAAACTATTAACTGGCGAACTACTTACTCTAGCTTCCCGGCAACAATTAATAGACTGGATGGAGGCG
GATAAAGTTGCAGGACCACTTCTGCGCTCGGCCCTTCCGGCTGGCTGGTTTATTGCTGATAAATCTGGAGCCGGTGAGCG
TGGGTCTCGCGGTATCATTGCAGCACTGGGGCCAGATGGTAAGCCCTCCCGTATCGTAGTTATCTACACGACGGGGAGTC
AGGCAACTATGGATGAACGAAATAGACAGATCGCTGAGATAGGTGCCTCACTGATTAAGCATTGGTAACTGTCAGACCAA
GTTTACTCATATATACTTTAGATTGATTTAAAACTTCATTTTTAATTTAAAAGGATCTAGGTGAAGATCCTTTTTGATAA
TCTCATGACCAAAATCCCTTAACGTGAGTTTTCGTTCCACTGAGCGTCAGACCCCGTAGAAAAGATCAAAGGATCTTCTT
GAGATCCTTTTTTTCTGCGCGTAATCTGCTGCTTGCAAACAAAAAAACCACCGCTACCAGCGGTGGTTTGTTTGCCGGAT
CAAGAGCTACCAACTCTTTTTCCGAAGGTAACTGGCTTCAGCAGAGCGCAGATACCAAATACTGTCCTTCTAGTGTAGCC
GTAGTTAGGCCACCACTTCAAGAACTCTGTAGCACCGCCTACATACCTCGCTCTGCTAATCCTGTTACCAGTGGCTGCTG
CCAGTGGCGATAAGTCGTGTCTTACCGGGTTGGACTCAAGACGATAGTTACCGGATAAGGCGCAGCGGTCGGGCTGAACG
GGGGGTTCGTGCACACAGCCCAGCTTGGAGCGAACGACCTACACCGAACTGAGATACCTACAGCGTGAGCATTGAGAAAG
CGCCACGCTTCCCGAAGGGAGAAAGGCGGACAGGTATCCGGTAAGCGGCAGGGTCGGAACAGGAGAGCGCACGAGGGAGC
TTCCAGGGGGAAACGCCTGGTATCTTTATAGTCCTGTCGGGTTTCGCCACCTCTGACTTGAGCGTCGATTTTTGTGATGC
TCGTCAGGGGGGCGGAGCCTATGGAAAAACGCCAGCAACGCGGCCTTTTTACGGTTCCTGGCCTTTTGCTGGCCTTTTGC
TCACATGTTCTTTCCTGCGTTATCCCCTGATTCTGTGGATAACCGTATTACCGCCTTTGAGTGAGCTGATACCGCTCGCC
GCAGCCGAACGACCGAGCGCAGCGAGTCAGTGAGCGAGGAAGCGGAAGAGCGCCCAATACGCAAACCGCCTCTCCCCGCG
CGTTGGCCGATTCATTAATGCAGCTGGCACGACAGGTTTCCCGACTGGAAAGCGGGCAGTGAGCGCAACGCAATTAATGT
GAGTTAGCTCACTCATTAGGCACCCCAGGCTTTACACTTTATGCTTCCGGCTCGTATGTTGTGTGGAATTGTGAGCGGAT
AACAATTTCACACAGGAAACAGCTATGACCATGATTACGCCAAGCTTTGCTCTTAGGAGTTTCCTAATACATCCCAAACT
CAAATATATAAAGCATTTGACTTGTTCTATGCCCTAGGGGGCGGGGGGAAGCTAAGCCAGCTTTTTTTAACATTTAAAAT
GTTAATTCCATTTTAAATGCACAGATGTTTTTATTTCATAAGGGTTTCAATGTGCATGAATGCTGCAATATTCCTGTTAC
CAAAGCTAGTATAAATAAAAATAGATAAACGTGGAAATTACTTAGAGTTTCTGTCATTAACGTTTCCTTCCTCAGTTGAC
AACATAAATGCGCTGCTGAGCAAGCCAGTTTGCATCTGTCAGGATCAATTTCCCATTATGCCAGTCATATTAATTACTAG
TCAATTAGTTGATTTTTATTTTTGACATATACATGTGAATGAAAGACCCCACCTGTAGGTTTGGCAAGCTAGCTTAAGTA
ACGCCATTTTGCAAGGCATGGAAAAATACATAACTGAGAATAGAAAAGTTCAGATCAAGGTCAGGAACAGATGGAACAGC
TGAATATGGGCCAAACAGGATATCTGTGGTAAGCAGTTCCTGCCCCGGCTCAGGGCCAAGAACAGATGGAACAGCTGAAT
ATGGGCCAAACAGGATATCTGTGGTAAGCAGTTCCTGCCCCGGCTCAGGGCCAAGAACAGATGGTCCCCAGATGCGGTCC
AGCCCTCAGCAGTTTCTAGAGAACCATCAGATGTTTCCAGGGTGCCCCAAGGACCTGAAATGACCCTGTGCCTTATTTGA
ACTAACCAATCAGTTCGCTTCTCGCTTCTGTTCGCGCGCTTATGCTCCCCGAGCTCAATAAAAGAGCCCACAACCCCTCA
CTCGGGGCGCCAGTCCTCCGATTGACTGAGTCGCCCGGGTACCCGTGTATCCAATAAACCCTCTTGCAGTTGCATCCGAC
TTGTGGTCTCGCTGTTCCTTGGGAGGGTCTCCTCTGAGTGATTGACTACCCGTCAGCGGGGGTCTTTCATTTGGGGGCTC
GTCCGGGATCGGGAGACCCCTGCCCAGGGACCACCGACCCACCACCGGGAGGTAAGCTGGCCAGCAACTTATCTGTGTCT
GTCCGATTGTCTAGTGTCTATGACTGATTTTATGCGCCTGCGTCGGTACTAGTTAGCTAACTAGCTCTGTATCTGGCGGA
CCCGTGGTGGAACTGACGAGTTCGGAACACCCGGCCGCAACCCTGGGAGACGTCCCAGGGACTTCGGGGGCCGTTTTTGT
GGCCCGACCTGAGTCCTAAAATCCCGATCGTTTAGGACTCTTTGGTGCACCCCCCTTAGAGGAGGGATATGTGGTTCTGG
TAGGAGACGAGAACCTAAAACAGTTCCCGCCTCCGTCTGAATTTTTGCTTTCGGTTTGGGACCGAAGCCGCGCCGCGCGT
CTTGTCTGCTGCAGCATCGTTCTGTGTTGTCTCTGTCTGACTGTGTTTCTGTATTTGTCTGAAAATATGGGCCCGGGCTA
GACTGTTACCACTCCCTTAAGTTTGACCTTAGGTCACTGGAAAGATGTCGAGCGGATCGCTCACAACCAGTCGGTAGATG
TCAAGAAGAGACGTTGGGTTACCTTCTGCTCTGCAGAATGGCCAACCTTTAACGTCGGATGGCCGCGAGACGGCACCTTT
AACCGAGACCTCATCACCCAGGTTAAGATCAAGGTCTTTTCACCTGGCCCGCATGGACACCCAGACCAGGTCCCCTACAT
CGTGACCTGGGAAGCCTTGGCTTTTGACCCCCCTCCCTGGGTCAAGCCCTTTGTACACCCTAAGCCTCCGCCTCCTCTTC
CTCCATCCGCCCCGTCTCTCCCCCTTGAACCTCCTCGTTCGACCCCGCCTCGATCCTCCCTTTATCCAGCCCTCACTCCT
TCTCTAGGCGCCCCCATATGGCCATATGAGATCTTATATGGGGCACCCCCGCCCCTTGTAAACTTCCCTGACCCTGACAT
GACAAGAGTTACTAACAGCCCCTCTCTCCAAGCTCACTTACAGGCTCTCTACTTAGTCCAGCACGAAGTCTGGAGACCTC
TGGCGGCAGCCTACCAAGAACAACTGGACCGA.

[0355] The isolated nucleic acid molecule having the nucleotide sequence of SEQ ID NO:955 encodes a FcRL-5-targeted CAR (designated as 69 FcRL5-targeted BBz CAR) comprising a fully human scFv (encoded by nucleotides 207-1037 of SEQ ID NO:955) that comprises a heavy chain variable region comprising amino acids having the sequence set forth in SEQ ID NO: 172, a light chain variable region comprising amino acids having the sequence set forth in SEQ ID NO:171, and a linker having an amino acid sequence of SEQ ID NO:307 positioned between the heavy chain variable region and the light chain variable region, a transmembrane domain comprising a CD8 polypeptide having 137 to 207 of SEQ TD NO: 960, and an intracellular domain comprising a CD3 polypeptide comprising amino acids 52 to 163 of SEQ ID NO: 941, and a co-stimulatory signaling region comprising a 4-1BB polypeptide having amino acids 214-255 of SEQ ID NO: 943. Nucleotides 207-1037 of SEQ ID NO: 955 encodes the human scFv. Nucleotides 1047-1259 of SEQ ID NO: 955 encodes the CD8 polypeptide comprised in the transmembrane domain. Nucleotides 1260-1385 of SEQ ID NO: 955 encodes the 4-1BB polypeptide comprised in the intracellular domain. Nucleotides 1386-1724 of SEQ ID NO: 955 encodes the CD3zeta polypeptide comprised in the intracellular domain. Other portions of SEQ ID NO: 955 are shown in Table 234.

TABLE 234

| | Nucleotide Sequence | |
|---|---|---|
| | Positions of SEQ ID NO: | |
| Portions | 955 | Number of Nucleotides |
| anti-FcRL5 scFv 69 | 207 . . . 1037 | 831 |
| CD8a TM | 1047 . . . 1259 | 213 |
| 4-1BB | 1260 . . . 1385 | 126 |
| CD3zeta | 1386 . . . 1724 | 339 |
| LTR | 2004 . . . 2473 | 470 |
| M13 fwd | 3172 . . . 3188 | 17 |
| AmpR promoter | 3663 . . . 3767 | 105 |
| AmpR | 3768 . . . 4628 | 861 |
| ori | 4799 . . . 5387 | 589 |
| CAP binding site | 5675 . . . 5696 | 22 |
| lac promoter | 5711 . . . 5741 | 31 |
| lac operator | 5749 . . . 5765 | 17 |
| M13 rev | 5773 . . . 5789 | 17 |
| LTR | 6198 . . . 6791 | 594 |
| MMLV Psi | 6854 . . . 7211 | 358 |
| gag (truncated) | 7276 . . . 7692 | 417 |

[0356] In certain embodiments, the isolated nucleic acid molecule comprises nucleic acids having the sequence set forth in SEQ ID NO:956 provided below:

[SEQ ID NO: 956]
CCGGTGGTACCTCACCCTTACCGAGTCGGCGACACAGTGTGGGTCCGCCGACACCAGACTAAGAACCTAGAACCTCGCTG
GAAAGGACCTTACACAGTCCTGCTGACCACCCCCACCGCCCTCAAAGTAGACGGCATCGCAGCTTGGATACACGCCGCCC
ACGTGAAGGCTGCCGACCCCGGGGGTGGACCATCCTCTAGACTGCCATGGAAACCGACACCCTGCTGCTGTGGGTGCTGC
TGCTGTGGGTGCCAGGATCCACAGGAAATTTTATGCTGACTCAGCCCCACTCTGTGTCGGAGTCTCCGGGGAAGACGGTA
ACCATCTCCTGCACCCGCAGCAGTGGCAGCATTGCCAGCAACTATGTGCAGTGGTACCAGCAGCGCCCGGGCAGTGCCCC
CACCACTGTGATCTATGAGGATAACCAAAGACCCTCTGGGGTCCCTGATCGGTTCTCTGGCTCCATCGACAGCTCCTCCA
ACTCTGCCTCCCTCACCATCTCTGGACTGAAGACTGAGGACGAGGCTGACTACTACTGTCAGTCTTATGATAGCAGCAAT
GTGGTATTCGGCGGAGGGACCAAGGTCACCGTCCTAGGTTCTAGAGGTGGTGGTGGTAGCGGCGGCGGCGGCTCTGGTGG
TGGTGGATCCCTCGAGATGGCCGAGGTGCAGCTGGTGGAGTCTGGGGGAGGCTTGGTACAGCCTGGAGGGTCCCTGAGAC
TCTCCTGTGCAGCCTCTGGATTCACCTTCAGTAGTTATGAAATGAACTGGGTCCGCCAGGCTCCAGGGAAGGGGCTGGAG
TGGGTTTCATACATTAGTAGTAGTGGTAGTACCATATACTACGCAGACTCTGTGAAGGGCCGATTCACCATCTCCAGAGA
CAACGCCAAGAACTCACTGTATCTGCAAATGAACAGCCTGAGAGCCGAGGACACGGCTGTTTATTACTGTGCACGCTGGG
ACTACGGTATGGACGTCTGGGGCCAAGGGACCACGGTCACCGTCTCCTCAGCGGCCGCACCCACCACGACGCCAGCGCCG
CGACCACCAACCCCGGCGCCCACGATCGCGTCGCAGCCCCTGTCCCTGCGCCCAGAGGCGTGCCGGCCAGCGGCGGGGGG
CGCAGTGCACACGAGGGGGCTGGACTTCGCCTGTGATATCTACATCTGGGCGCCCCTGGCCGGGACTTGTGGGGTCCTTC
TCCTGTCACTGGTTATCACCCTTTACTGCAACAAACGGGGCAGAAAGAAGCTCCTGTATATATTCAAACAACCATTTATG
AGACCAGTACAAACTACTCAAGAGGAAGATGGCTGTAGCTGCCGATTTCCAGAAGAAGAAGAAGGAGGATGTGAACTGAG
AGTGAAGTTCAGCAGGAGCGCAGAGCCCCCCGCGTACCAGCAGGGCCAGAACCAGCTCTATAACGAGCTCAATCTAGGAC
GAAGAGAGGAGTACGATGTTTTGGACAAGAGACGTGGCCGGGACCCTGAGATGGGGGGAAAGCCGAGAAGGAAGAACCCT
CAGGAAGGCCTGTACAATGAACTGCAGAAAGATAAGATGGCGGAGGCCTACAGTGAGATTGGGATGAAAGGCGAGCGCCG
GAGGGGCAAGGGGCACGATGGCCTTTACCAGGGTCTCAGTACAGCCACCAAGGACACCTACGACGCCCTTCACATGCAGG
CCCTGCCCCCTCGCTAACAGCCACTCGAGGATCCGGATTAGTCCAATTTGTTAAAGACAGGATATCAGTGGTCCAGGCTC
TAGTTTTGACTCAACAATATCACCAGCTGAAGCCTATAGAGTACGAGCCATAGATAAAATAAAAGATTTTATTTAGTCTC
CAGAAAAAGGGGGGAATGAAAGACCCCACCTGTAGGTTTGGCAAGCTAGCTTAAGTAACGCCATTTTGCAAGGCATGGAA
AAATACATAACTGAGAATAGAGAAGTTCAGATCAAGGTCAGGAACAGATGGAACAGCTGAATATGGGCCAAACAGGATAT
CTGTGGTAAGCAGTTCCTGCCCCGGCTCAGGGCCAAGAACAGATGGAACAGCTGAATATGGGCCAAACAGGATATCTGTG
GTAAGCAGTTCCTGCCCCGGCTCAGGGCCAAGAACAGATGGTCCCCAGATGCGGTCCAGCCCTCAGCAGTTTCTAGAGAA
CCATCAGATGTTTCCAGGGTGCCCCAAGGACCTGAAATGACCCTGTGCCTTATTTGAACTAACCAATCAGTTCGCTTCTC
GCTTCTGTTCGCGCGCTTCTGCTCCCCGAGCTCAATAAAAGAGCCCACAACCCCTCACTCGGGGCGCCAGTCCTCCGATT
GACTGAGTCGCCCGGGTACCCGTGTATCCAATAAACCCTCTTGCAGTTGCATCCGACTTGTGGTCTCGCTGTTCCTTGGG
AGGGTCTCCTCTGAGTGATTGACTACCCGTCAGCGGGGGTCTTTCACACATGCAGCATGTATCAAAATTAATTTGGTTTT
TTTTCTTAAGTATTTACATTAAATGGCCATAGTACTTAAAGTTACATTGGCTTCCTTGAAATAAACATGGAGTATTCAGA
ATGTGTCATAAATATTTCTAATTTTAAGATAGTATCTCCATTGGCTTTCTACTTTTTCTTTTATTTTTTTTTGTCCTCTG
TCTTCCATTTGTTGTTGTTGTTGTTTGTTTGTTTGTTTGTTGGTTGGTTGGTTAATTTTTTTTTAAAGATCCTACACTAT
AGTTCAAGCTAGACTATTAGCTACTCTGTAACCCAGGGTGACCTTGAAGTCATGGGTAGCCTGCTGTTTTAGCCTTCCCA
CATCTAAGATTACAGGTATGAGCTATCATTTTTGGTATATTGATTGATTGATTGATTGATGTGTGTGTGTGTGATTGTGT
TTGTGTGTGTGACTGTGAAAATGTGTGTATGGGTGTGTGTGAATGTGTGTATGTATGTGTGTGTGTGAGTGTGTGTGTGT
GTGTGTGCATGTGTGTGTGTGTGACTGTGTCTATGTGTATGACTGTGTGTGTGTGTGTGTGTGTGTGTGTGTGTGTGTGT
GTGTGTGTGTTGTGAAAAAATATTCTATGGTAGTGAGAGCCAACGCTCCGGCTCAGGTGTCAGGTTGGTTTTTGAGACAG
AGTCTTTCACTTAGCTTGGAATTCACTGGCCGTCGTTTTACAACGTCGTGACTGGGAAAACCCTGGCGTTACCCAACTTA
ATCGCCTTGCAGCACATCCCCCTTTCGCCAGCTGGCGTAATAGCGAAGAGGCCCGCACCGATCGCCCTTCCCAACAGTTG
CGCAGCCTGAATGGCGAATGGCGCCTGATGCGGTATTTTCTCCTTACGCATCTGTGCGGTATTTCACACCGCATATGGTG
CACTCTCAGTACAATCTGCTCTGATGCCGCATAGTTAAGCCAGCCCCGACACCCGCCAACACCCGCTGACGCGCCCTGAC
GGGCTTGTCTGCTCCCGGCATCCGCTTACAGACAAGCTGTGACCGTCTCCGGGAGCTGCATGTGTCAGAGGTTTTCACCG
TCATCACCGAAACGCGCGATGACGAAAGGGCCTCGTGATACGCCTATTTTTATAGGTTAATGTCATGATAATAATGGTTT
CTTAGACGTCAGGTGGCACTTTTCGGGGAAATGTGCGCGGAACCCCTATTTGTTTATTTTTCTAAATACATTCAAATATG
TATCCGCTCATGAGACAATAACCCTGATAAATGCTTCAATAATATTGAAAAAGGAAGAGTATGAGTATTCAACATTTCCG
TGTCGCCCTTATTCCCTTTTTTGCGGCATTTTGCCTTCCTGTTTTTGCTCACCCAGAAACGCTGGTGAAAGTAAAAGATG
CTGAAGATCAGTTGGGTGCACGAGTGGGTTACATCGAACTGGATCTCAACAGCGGTAAGATCCTTGAGAGTTTTCGCCCC
GAAGAACGTTTTCCAATGATGAGCACTTTTAAAGTTCTGCTATGTGGCGCGGTATTATCCCGTATTGACGCCGGGCAAGA
GCAACTCGGTCGCCGCATACACTATTCTCAGAATGACTTGGTTGAGTACTCACCAGTCACAGAAAAGCATCTTACGGATG
GCATGACAGTAAGAGAATTATGCAGTGCTGCCATAACCATGAGTGATAACACTGCGGCCAACTTACTTCTGACAACGATC
GGAGGACCGAAGGAGCTAACCGCTTTTTTGCACAACATGGGGGATCATGTAACTCGCCTTGATCGTTGGGAACCGGAGCT
GAATGAAGCCATACCAAACGACGAGCGTGACACCACGATGCCTGTAGCAATGGCAACAACGTTGCGCAAACTATTAACTG
GCGAACTACTTACTCTAGCTTCCCGGCAACAATTAATAGACTGGATGGAGGCGGATAAAGTTGCAGGACCACTTCTGCGC
TCGGCCCTTCCGGCTGGCTGGTTTATTGCTGATAAATCTGGAGCCGGTGAGCGTGGGTCTCGCGGTATCATTGCAGCACT
GGGGCCAGATGGTAAGCCCTCCCGTATCGTAGTTATCTACACGACGGGGAGTCAGGCAACTATGGATGAACGAAATAGAC
AGATCGCTGAGATAGGTGCCTCACTGATTAAGCATTGGTAACTGTCAGACCAAGTTTACTCATATATACTTTAGATTGAT
TTAAAACTTCATTTTTAATTTAAAAGGATCTAGGTGAAGATCCTTTTTGATAATCTCATGACCAAAATCCCTTAACGTGA
GTTTTCGTTCCACTGAGCGTCAGACCCCGTAGAAAAGATCAAAGGATCTTCTTGAGATCCTTTTTTTCTGCGCGTAATCT
GCTGCTTGCAAACAAAAAAACCACCGCTACCAGCGGTGGTTTGTTTGCCGGATCAAGAGCTACCAACTCTTTTTCCGAAG
GTAACTGGCTTCAGCAGAGCGCAGATACCAAATACTGTCCTTCTAGTGTAGCCGTAGTTAGGCCACCACTTCAAGAACTC
TGTAGCACCGCCTACATACCTCGCTCTGCTAATCCTGTTACCAGTGGCTGCTGCCAGTGGCGATAAGTCGTGTCTTACCG
GGTTGGACTCAAGACGATAGTTACCGGATAAGGCGCAGCGGTCGGGCTGAACGGGGGGTTCGTGCACACAGCCCAGCTTG
GAGCGAACGACCTACACCGAACTGAGATACCTACAGCGTGAGCATTGAGAAAGCGCCACGCTTCCCGAAGGGAGAAAGGC
GGACAGGTATCCGGTAAGCGGCAGGGTCGGAACAGGAGAGCGCACGAGGGAGCTTCCAGGGGGAAACGCCTGGTATCTTT
ATAGTCCTGTCGGGTTTCGCCACCTCTGACTTGAGCGTCGATTTTTGTGATGCTCGTCAGGGGGGCGGAGCCTATGGAAA
AACGCCAGCAACGCGGCCTTTTTACGGTTCCTGGCCTTTTGCTGGCCTTTTGCTCACATGTTCTTTCCTGCGTTATCCCC
TGATTCTGTGGATAACCGTATTACCGCCTTTGAGTGAGCTGATACCGCTCGCCGCAGCCGAACGACCGAGCGCAGCGAGT
CAGTGAGCGAGGAAGCGGAAGAGCGCCCAATACGCAAACCGCCTCTCCCCGCGCGTTGGCCGATTCATTAATGCAGCTGG
CACGACAGGTTTCCCGACTGGAAAGCGGGCAGTGAGCGCAACGCAATTAATGTGAGTTAGCTCACTCATTAGGCACCCCA
GGCTTTACACTTTATGCTTCCGGCTCGTATGTTGTGTGGAATTGTGAGCGGATAACAATTTCACACAGGAAACAGCTATG
ACCATGATTACGCCAAGCTTTGCTCTTAGGAGTTTCCTAATACATCCCAAACTCAAATATATAAAGCATTTGACTTGTTC
TATGCCCTAGGGGGCGGGGGGAAGCTAAGCCAGCTTTTTTTAACATTTAAAATGTTAATTCCATTTTAAATGCACAGATG
TTTTTATTTCATAAGGGTTTCAATGTGCATGAATGCTGCAATATTCCTGTTACCAAAGCTAGTATAAATAAAAATAGATA
AACGTGGAAATTACTTAGAGTTTCTGTCATTAACGTTTCCTTCCTCAGTTGACAACATAAATGCGCTGCTGAGCAAGCCA
GTTTGCATCTGTCAGGATCAATTTCCCATTATGCCAGTCATATTAATTACTAGTCAATTAGTTGATTTTTATTTTTGACA
TATACATGTGAATGAAAGACCCCACCTGTAGGTTTGGCAAGCTAGCTTAAGTAACGCCATTTTGCAAGGCATGGAAAAAT
ACATAACTGAGAATAGAAAAGTTCAGATCAAGGTCAGGAACAGATGGAACAGCTGAATATGGGCCAAACAGGATATCTGT
GGTAAGCAGTTCCTGCCCCGGCTCAGGGCCAAGAACAGATGGAACAGCTGAATATGGGCCAAACAGGATATCTGTGGTAA
GCAGTTCCTGCCCCGGCTCAGGGCCAAGAACAGATGGTCCCCAGATGCGGTCCAGCCCTCAGCAGTTTCTAGAGAACCAT
CAGATGTTTCCAGGGTGCCCCAAGGACCTGAAATGACCCTGTGCCTTATTTGAACTAACCAATCAGTTCGCTTCTCGCTT
CTGTTCGCGCGCTTATGCTCCCCGAGCTCAATAAAAGAGCCCACAACCCCTCACTCGGGGCGCCAGTCCTCCGATTGACT
GAGTCGCCCGGGTACCCGTGTATCCAATAAACCCTCTTGCAGTTGCATCCGACTTGTGGTCTCGCTGTTCCTTGGGAGGG
TCTCCTCTGAGTGATTGACTACCCGTCAGCGGGGGTCTTTCATTTGGGGGCTCGTCCGGGATCGGGAGACCCCTGCCCAG
GGACCACCGACCCACCACCGGGAGGTAAGCTGGCCAGCAACTTATCTGTGTCTGTCCGATTGTCTAGTGTCTATGACTGA
TTTTATGCGCCTGCGTCGGTACTAGTTAGCTAACTAGCTCTGTATCTGGCGGACCCGTGGTGGAACTGACGAGTTCGGAA
CACCCGGCCGCAACCCTGGGAGACGTCCCAGGGACTTCGGGGGCCGTTTTTGTGGCCCGACCTGAGTCCTAAAATCCCGA
TCGTTTAGGACTCTTTGGTGCACCCCCCTTAGAGGAGGGATATGTGGTTCTGGTAGGAGACGAGAACCTAAAACAGTTCC
CGCCTCCGTCTGAATTTTTGCTTTCGGTTTGGGACCGAAGCCGCGCCGCGCGTCTTGTCTGCTGCAGCATCGTTCTGTGT
TGTCTCTGTCTGACTGTGTTTCTGTATTTGTCTGAAAATATGGGCCCGGGCTAGACTGTTACCACTCCCTTAAGTTTGAC
CTTAGGTCACTGGAAAGATGTCGAGCGGATCGCTCACAACCAGTCGGTAGATGTCAAGAAGAGACGTTGGGTTACCTTCT
GCTCTGCAGAATGGCCAACCTTTAACGTCGGATGGCCGCGAGACGGCACCTTTAACCGAGACCTCATCACCCAGGTTAAG
ATCAAGGTCTTTTCACCTGGCCCGCATGGACACCCAGACCAGGTCCCCTACATCGTGACCTGGGAAGCCTTGGCTTTTGA
CCCCCCTCCCTGGGTCAAGCCCTTTGTACACCCTAAGCCTCCGCCTCCTCTTCCTCCATCCGCCCCGTCTCTCCCCCTTG
AACCTCCTCGTTCGACCCCGCCTCGATCCTCCCTTTATCCAGCCCTCACTCCTTCTCTAGGCGCCCCCATATGGCCATAT
GAGATCTTATATGGGGCACCCCCGCCCCTTGTAAACTTCCCTGACCCTGACATGACAAGAGTTACTAACAGCCCCTCTCT
CCAAGCTCACTTACAGGCTCTCTACTTAGTCCAGCACGAAGTCTGGAGACCTCTGGCGGCAGCCTACCAAGAACAACTGG
ACCGA.

[0357] The isolated nucleic acid molecule having the nucleotide sequence of SEQ ID NO:956 encodes a FcRL-5-targeted CAR (designated as 104 FcRL5-targeted BBz CAR) comprising a fully human scFv (encoded by nucleotides 207-1010) that comprises a heavy chain variable region comprising amino acids having the sequence set forth in SEQ ID NO:216, a light chain variable region comprising amino acids having the sequence set forth in SEQ ID NO:215, and a linker having an amino acid sequence of SEQ ID NO:307 positioned between the heavy chain variable region and the light chain variable region, a transmembrane domain comprising a CD8 polypeptide having 137 to 207 of SEQ ID NO: 960, and an intracellular domain comprising a CD3 polypeptide comprising amino acids 52 to 163 of SEQ ID NO: 941, and a co-stimulatory signaling region comprising a 4-1BB polypeptide having amino acids 214-255 of SEQ ID NO: 943. Nucleotides 207-1010 of SEQ ID NO: 956 encodes the human scFv. Nucleotides 1020-1232 of SEQ ID NO: 956 encodes the CD8 polypeptide comprised in the transmembrane domain. Nucleotides 1233-1358 of SEQ ID NO: 956 encodes the 4-1BB polypeptide comprised in the intracellular domain. Nucleotides 1359-1697 of SEQ ID NO: 956 encodes the CD3zeta polypeptide comprised in the intracellular domain. Other portions of SEQ ID NO: 956 are shown in Table 235.

TABLE 235

| | Nucleotide Sequence | |
|---|---|---|
| | Positions of SEQ ID NO: | |
| Portions | 956 | Number of Nucleotides |
| antiFcRL5 scFv 104 | 207 . . . 1010 | 804 |
| CD8a TM | 1020 . . . 1232 | 213 |
| 4-1BB | 1233 . . . 1358 | 126 |
| CD3zeta | 1359 . . . 1697 | 339 |
| LTR | 1977 . . . 2446 | 470 |
| M13 fwd | 3145 . . . 3161 | 17 |
| AmpR promoter | 3636 . . . 3740 | 105 |
| AmpR | 3741 . . . 4601 | 861 |
| ori | 4772 . . . 5360 | 589 |
| CAP binding site | 5648 . . . 5669 | 22 |
| lac promoter | 5684 . . . 5714 | 31 |
| lac operator | 5722 . . . 5738 | 17 |
| M13 rev | 5746 . . . 5762 | 17 |
| LTR | 6171 . . . 6764 | 594 |
| MMLV Psi | 6827 . . . 7184 | 358 |
| gag (truncated) | 7249 . . . 7665 | 417 |

[0358] In certain embodiments, the isolated nucleic acid molecule comprises nucleic acids having the sequence set forth in SEQ ID NO:957 provided below:

[SEQ ID NO: 957]
CCGGTGGTACCTCACCCTTACCGAGTCGGCGACACAGTGTGGGTCCGCCGACACCAGACTAAGAACCTAGAACCTCGCTG
GAAAGGACCTTACACAGTCCTGCTGACCACCCCCACCGCCCTCAAAGTAGACGGCATCGCAGCTTGGATACACGCCGCCC
ACGTGAAGGCTGCCGACCCCGGGGGTGGACCATCCTCTAGACTGCCATGGAAACCGATACACTGCTGCTGTGGGTGCTGC
TGCTGTGGGTGCCAGGATCCACAGGCTCCTATGTGCTGACTCAGCCACCCTCAGTGTCCGTGTCCCCAGGACAGACAGCC
AGCATCACCTGCTCTGGAGATAGATTGACGAATAAATATGTTTCCTGGTATCAACAGAAGCCAGGCCAGTCCCCTGTGTT
GGTCATCTATGAGGATGCCAAGCGGCCCTCAGGGATCCCTGCGCGATTCTCTGGCTCCAACTCTGGGAACACAGCCACTC
TGACCATCAGCGGGACCCAGGCTATGGATGAGTCTGAATATTACTGTCAGGCGTGGGACAGCAGTGTGGTGGTTTTTGGC
GGAGGGACCAAGCTGACCGTCCTAGGTTCTAGAGGTGGTGGTGGTAGCGGCGGCGGCGGCTCTGGTGGTGGTGGATCCCT
CGAGATGGCCGAGGTGCAGCTGGTGGAGTCTGGGGGAGGCTTGGTACAGCCTGGCAGGTCCCTGAGACTCTCCTGTGCAG
CCTCTGGATTTACCTTTGATGATTATGCCATGCACTGGGTCCGGCAAGCTCCAGGGAAGGGCCTGGAGTGGGTCTCAGGT
ATTAGTTGGAATAGTGGTAGTATAGGCTATGCGGACTCTGTGAAGGGCCGATTCACCATCTCCAGAGACAACGCCAAGAA
CTCCCTGTATCTGCAAATGAACAGTCTGAGAGATGAGGACACGGCCTTGTATTACTGTGCAAAAGACCGAGGGGGGGGAG
TTATCGTTAAGGATGCTTTTGATATCTGGGGCCAAGGGACAATGGTCACCGTCTCTTCAGCGGCCGCACCCACCACGACG
CCAGCGCCGCGACCACCAACCCCGGCGCCCACGATCGCGTCGCAGCCCCTGTCCCTGCGCCCAGAGGCGTGCCGGCCAGC
GGCGGGGGGCGCAGTGCACACGAGGGGGCTGGACTTCGCCTGTGATATCTACATCTGGGCGCCCCTGGCCGGGACTTGTG
GGGTCCTTCTCCTGTCACTGGTTATCACCCTTTACTGCAACAAACGGGGCAGAAAGAAGCTCCTGTATATATTCAAACAA
CCATTTATGAGACCAGTACAAACTACTCAAGAGGAAGATGGCTGTAGCTGCCGATTTCCAGAAGAAGAAGAAGGAGGATG
TGAACTGAGAGTGAAGTTCAGCAGGAGCGCAGAGCCCCCCGCGTACCAGCAGGGCCAGAACCAGCTCTATAACGAGCTCA
ATCTAGGACGAAGAGAGGAGTACGATGTTTTGGACAAGAGACGTGGCCGGGACCCTGAGATGGGGGGAAAGCCGAGAAGG
AAGAACCCTCAGGAAGGCCTGTACAATGAACTGCAGAAAGATAAGATGGCGGAGGCCTACAGTGAGATTGGGATGAAAGG
CGAGCGCCGGAGGGGCAAGGGGCACGATGGCCTTTACCAGGGTCTCAGTACAGCCACCAAGGACACCTACGACGCCCTTC
ACATGCAGGCCCTGCCCCCTCGCTAACAGCCACTCGAGGATCCGGATTAGTCCAATTTGTTAAAGACAGGATATCAGTGG
TCCAGGCTCTAGTTTTGACTCAACAATATCACCAGCTGAAGCCTATAGAGTACGAGCCATAGATAAAATAAAAGATTTTA
TTTAGTCTCCAGAAAAAGGGGGGAATGAAAGACCCCACCTGTAGGTTTGGCAAGCTAGCTTAAGTAACGCCATTTTGCAA
GGCATGGAAAAATACATAACTGAGAATAGAGAAGTTCAGATCAAGGTCAGGAACAGATGGAACAGCTGAATATGGGCCAA
ACAGGATATCTGTGGTAAGCAGTTCCTGCCCCGGCTCAGGGCCAAGAACAGATGGAACAGCTGAATATGGGCCAAACAGG
ATATCTGTGGTAAGCAGTTCCTGCCCCGGCTCAGGGCCAAGAACAGATGGTCCCCAGATGCGGTCCAGCCCTCAGCAGTT
TCTAGAGAACCATCAGATGTTTCCAGGGTGCCCCAAGGACCTGAAATGACCCTGTGCCTTATTTGAACTAACCAATCAGT
TCGCTTCTCGCTTCTGTTCGCGCGCTTCTGCTCCCCGAGCTCAATAAAAGAGCCCACAACCCCTCACTCGGGGCGCCAGT
CCTCCGATTGACTGAGTCGCCCGGGTACCCGTGTATCCAATAAACCCTCTTGCAGTTGCATCCGACTTGTGGTCTCGCTG
TTCCTTGGGAGGGTCTCCTCTGAGTGATTGACTACCCGTCAGCGGGGGTCTTTCACACATGCAGCATGTATCAAAATTAA
TTTGGTTTTTTTTCTTAAGTATTTACATTAAATGGCCATAGTACTTAAAGTTACATTGGCTTCCTTGAAATAAACATGGA
GTATTCAGAATGTGTCATAAATATTTCTAATTTTAAGATAGTATCTCCATTGGCTTTCTACTTTTTCTTTTATTTTTTTT
TGTCCTCTGTCTTCCATTTGTTGTTGTTGTTGTTTGTTTGTTTGTTTGTTGGTTGGTTGGTTAATTTTTTTTTAAAGATC
CTACACTATAGTTCAAGCTAGACTATTAGCTACTCTGTAACCCAGGGTGACCTTGAAGTCATGGGTAGCCTGCTGTTTTA
GCCTTCCCACATCTAAGATTACAGGTATGAGCTATCATTTTTGGTATATTGATTGATTGATTGATTGATGTGTGTGTGTG
TGATTGTGTTTGTGTGTGTGACTGTGAAAATGTGTGTATGGGTGTGTGTGAATGTGTGTATGTATGTGTGTGTGTGAGTG
TGTGTGTGTGTGTGTGCATGTGTGTGTGTGTGACTGTGTCTATGTGTATGACTGTGTGTGTGTGTGTGTGTGTGTGTGTG
TGTGTGTGTGTGTGTGTGTTGTGAAAAAATATTCTATGGTAGTGAGAGCCAACGCTCCGGCTCAGGTGTCAGGTTGGTTT
TTGAGACAGAGTCTTTCACTTAGCTTGGAATTCACTGGCCGTCGTTTTACAACGTCGTGACTGGGAAAACCCTGGCGTTA
CCCAACTTAATCGCCTTGCAGCACATCCCCCTTTCGCCAGCTGGCGTAATAGCGAAGAGGCCCGCACCGATCGCCCTTCC
CAACAGTTGCGCAGCCTGAATGGCGAATGGCGCCTGATGCGGTATTTTCTCCTTACGCATCTGTGCGGTATTTCACACCG
CATATGGTGCACTCTCAGTACAATCTGCTCTGATGCCGCATAGTTAAGCCAGCCCCGACACCCGCCAACACCCGCTGACG
CGCCCTGACGGGCTTGTCTGCTCCCGGCATCCGCTTACAGACAAGCTGTGACCGTCTCCGGGAGCTGCATGTGTCAGAGG
TTTTCACCGTCATCACCGAAACGCGCGATGACGAAAGGGCCTCGTGATACGCCTATTTTTATAGGTTAATGTCATGATAA
TAATGGTTTCTTAGACGTCAGGTGGCACTTTTCGGGGAAATGTGCGCGGAACCCCTATTTGTTTATTTTTCTAAATACAT
TCAAATATGTATCCGCTCATGAGACAATAACCCTGATAAATGCTTCAATAATATTGAAAAAGGAAGAGTATGAGTATTCA
ACATTTCCGTGTCGCCCTTATTCCCTTTTTTGCGGCATTTTGCCTTCCTGTTTTTGCTCACCCAGAAACGCTGGTGAAAG
TAAAAGATGCTGAAGATCAGTTGGGTGCACGAGTGGGTTACATCGAACTGGATCTCAACAGCGGTAAGATCCTTGAGAGT
TTTCGCCCCGAAGAACGTTTTCCAATGATGAGCACTTTTAAAGTTCTGCTATGTGGCGCGGTATTATCCCGTATTGACGC
CGGGCAAGAGCAACTCGGTCGCCGCATACACTATTCTCAGAATGACTTGGTTGAGTACTCACCAGTCACAGAAAAGCATC
TTACGGATGGCATGACAGTAAGAGAATTATGCAGTGCTGCCATAACCATGAGTGATAACACTGCGGCCAACTTACTTCTG
ACAACGATCGGAGGACCGAAGGAGCTAACCGCTTTTTTGCACAACATGGGGGATCATGTAACTCGCCTTGATCGTTGGGA
ACCGGAGCTGAATGAAGCCATACCAAACGACGAGCGTGACACCACGATGCCTGTAGCAATGGCAACAACGTTGCGCAAAC
TATTAACTGGCGAACTACTTACTCTAGCTTCCCGGCAACAATTAATAGACTGGATGGAGGCGGATAAAGTTGCAGGACCA
CTTCTGCGCTCGGCCCTTCCGGCTGGCTGGTTTATTGCTGATAAATCTGGAGCCGGTGAGCGTGGGTCTCGCGGTATCAT
TGCAGCACTGGGGCCAGATGGTAAGCCCTCCCGTATCGTAGTTATCTACACGACGGGGAGTCAGGCAACTATGGATGAAC
GAAATAGACAGATCGCTGAGATAGGTGCCTCACTGATTAAGCATTGGTAACTGTCAGACCAAGTTTACTCATATATACTT
TAGATTGATTTAAAACTTCATTTTTAATTTAAAAGGATCTAGGTGAAGATCCTTTTTGATAATCTCATGACCAAAATCCC
TTAACGTGAGTTTTCGTTCCACTGAGCGTCAGACCCCGTAGAAAAGATCAAAGGATCTTCTTGAGATCCTTTTTTTCTGC
GCGTAATCTGCTGCTTGCAAACAAAAAAACCACCGCTACCAGCGGTGGTTTGTTTGCCGGATCAAGAGCTACCAACTCTT
TTTCCGAAGGTAACTGGCTTCAGCAGAGCGCAGATACCAAATACTGTCCTTCTAGTGTAGCCGTAGTTAGGCCACCACTT
CAAGAACTCTGTAGCACCGCCTACATACCTCGCTCTGCTAATCCTGTTACCAGTGGCTGCTGCCAGTGGCGATAAGTCGT
GTCTTACCGGGTTGGACTCAAGACGATAGTTACCGGATAAGGCGCAGCGGTCGGGCTGAACGGGGGGTTCGTGCACACAG
CCCAGCTTGGAGCGAACGACCTACACCGAACTGAGATACCTACAGCGTGAGCATTGAGAAAGCGCCACGCTTCCCGAAGG
GAGAAAGGCGGACAGGTATCCGGTAAGCGGCAGGGTCGGAACAGGAGAGCGCACGAGGGAGCTTCCAGGGGGAAACGCCT
GGTATCTTTATAGTCCTGTCGGGTTTCGCCACCTCTGACTTGAGCGTCGATTTTTGTGATGCTCGTCAGGGGGGCGGAGC
CTATGGAAAAACGCCAGCAACGCGGCCTTTTTACGGTTCCTGGCCTTTTGCTGGCCTTTTGCTCACATGTTCTTTCCTGC
GTTATCCCCTGATTCTGTGGATAACCGTATTACCGCCTTTGAGTGAGCTGATACCGCTCGCCGCAGCCGAACGACCGAGC
GCAGCGAGTCAGTGAGCGAGGAAGCGGAAGAGCGCCCAATACGCAAACCGCCTCTCCCCGCGCGTTGGCCGATTCATTAA
TGCAGCTGGCACGACAGGTTTCCCGACTGGAAAGCGGGCAGTGAGCGCAACGCAATTAATGTGAGTTAGCTCACTCATTA
GGCACCCCAGGCTTTACACTTTATGCTTCCGGCTCGTATGTTGTGTGGAATTGTGAGCGGATAACAATTTCACACAGGAA
ACAGCTATGACCATGATTACGCCAAGCTTTGCTCTTAGGAGTTTCCTAATACATCCCAAACTCAAATATATAAAGCATTT
GACTTGTTCTATGCCCTAGGGGGCGGGGGGAAGCTAAGCCAGCTTTTTTTAACATTTAAAATGTTAATTCCATTTTAAAT
GCACAGATGTTTTTATTTCATAAGGGTTTCAATGTGCATGAATGCTGCAATATTCCTGTTACCAAAGCTAGTATAAATAA
AAATAGATAAACGTGGAAATTACTTAGAGTTTCTGTCATTAACGTTTCCTTCCTCAGTTGACAACATAAATGCGCTGCTG
AGCAAGCCAGTTTGCATCTGTCAGGATCAATTTCCCATTATGCCAGTCATATTAATTACTAGTCAATTAGTTGATTTTTA
TTTTTGACATATACATGTGAATGAAAGACCCCACCTGTAGGTTTGGCAAGCTAGCTTAAGTAACGCCATTTTGCAAGGCA
TGGAAAAATACATAACTGAGAATAGAAAAGTTCAGATCAAGGTCAGGAACAGATGGAACAGCTGAATATGGGCCAAACAG
GATATCTGTGGTAAGCAGTTCCTGCCCCGGCTCAGGGCCAAGAACAGATGGAACAGCTGAATATGGGCCAAACAGGATAT
CTGTGGTAAGCAGTTCCTGCCCCGGCTCAGGGCCAAGAACAGATGGTCCCCAGATGCGGTCCAGCCCTCAGCAGTTTCTA
GAGAACCATCAGATGTTTCCAGGGTGCCCCAAGGACCTGAAATGACCCTGTGCCTTATTTGAACTAACCAATCAGTTCGC
TTCTCGCTTCTGTTCGCGCGCTTATGCTCCCCGAGCTCAATAAAAGAGCCCACAACCCCTCACTCGGGGCGCCAGTCCTC
CGATTGACTGAGTCGCCCGGGTACCCGTGTATCCAATAAACCCTCTTGCAGTTGCATCCGACTTGTGGTCTCGCTGTTCC
TTGGGAGGGTCTCCTCTGAGTGATTGACTACCCGTCAGCGGGGGTCTTTCATTTGGGGGCTCGTCCGGGATCGGGAGACC
CCTGCCCAGGGACCACCGACCCACCACCGGGAGGTAAGCTGGCCAGCAACTTATCTGTGTCTGTCCGATTGTCTAGTGTC
TATGACTGATTTTATGCGCCTGCGTCGGTACTAGTTAGCTAACTAGCTCTGTATCTGGCGGACCCGTGGTGGAACTGACG
AGTTCGGAACACCCGGCCGCAACCCTGGGAGACGTCCCAGGGACTTCGGGGGCCGTTTTTGTGGCCCGACCTGAGTCCTA
AAATCCCGATCGTTTAGGACTCTTTGGTGCACCCCCCTTAGAGGAGGGATATGTGGTTCTGGTAGGAGACGAGAACCTAA
AACAGTTCCCGCCTCCGTCTGAATTTTTGCTTTCGGTTTGGGACCGAAGCCGCGCCGCGCGTCTTGTCTGCTGCAGCATC
GTTCTGTGTTGTCTCTGTCTGACTGTGTTTCTGTATTTGTCTGAAAATATGGGCCCGGGCTAGACTGTTACCACTCCCTT
AAGTTTGACCTTAGGTCACTGGAAAGATGTCGAGCGGATCGCTCACAACCAGTCGGTAGATGTCAAGAAGAGACGTTGGG
TTACCTTCTGCTCTGCAGAATGGCCAACCTTTAACGTCGGATGGCCGCGAGACGGCACCTTTAACCGAGACCTCATCACC
CAGGTTAAGATCAAGGTCTTTTCACCTGGCCCGCATGGACACCCAGACCAGGTCCCCTACATCGTGACCTGGGAAGCCTT
GGCTTTTGACCCCCCTCCCTGGGTCAAGCCCTTTGTACACCCTAAGCCTCCGCCTCCTCTTCCTCCATCCGCCCCGTCTC
TCCCCCTTGAACCTCCTCGTTCGACCCCGCCTCGATCCTCCCTTTATCCAGCCCTCACTCCTTCTCTAGGCGCCCCCATA
TGGCCATATGAGATCTTATATGGGGCACCCCCGCCCCTTGTAAACTTCCCTGACCCTGACATGACAAGAGTTACTAACAG
CCCCTCTCTCCAAGCTCACTTACAGGCTCTCTACTTAGTCCAGCACGAAGTCTGGAGACCTCTGGCGGCAGCCTACCAAG
AACAACTGGACCGA.

[0359] The isolated nucleic acid molecule having the nucleotide sequence of SEQ ID NO:957 encodes a FcRL-5-targeted CAR (designated as 105 FcRL5-targeted BBz CAR) comprising a fully human scFv (encoded by nucleotides 207-1019) that comprises a heavy chain variable region comprising amino acids having the sequence set forth in SEQ ID NO:220, a light chain variable region comprising amino acids having the sequence set forth in SEQ ID NO:219, and a linker having an amino acid sequence of SEQ ID NO:307 positioned between the heavy chain variable region and the light chain variable region, a transmembrane domain comprising a CD8 polypeptide having 137 to 207 of SEQ ID NO: 960, and an intracellular domain comprising a CD3 polypeptide comprising amino acids 52 to 163 of SEQ ID NO: 941, and a co-stimulatory signaling region comprising a 4-1BB polypeptide having amino acids 214-255 of SEQ ID NO: 943. Nucleotides 207-1019 of SEQ ID NO: 957 encodes the human scFv. Nucleotides 1029-1241 of SEQ ID NO: 957 encodes the CD8 polypeptide comprised in the transmembrane domain. Nucleotides 1242-1367 of SEQ ID NO: 957 encodes the 4-1BB polypeptide comprised in the intracellular domain. Nucleotides 1368-1706 of SEQ ID NO: 957 encodes the CD3zeta polypeptide comprised in the intracellular domain. Other portions of SEQ ID NO: 957 are shown in Table 236.

TABLE 236

| | Nucleotide Sequence | |
|---|---|---|
| | Positions of SEQ ID NO: | |
| Portions | 957 | Number of Nucleotides |
| antiFcRL5 scFv 105 | 207 . . . 1019 | 813 |
| CD8a TM | 1029 . . . 1241 | 213 |
| 4-1BB | 1242 . . . 1367 | 126 |
| CD3zeta | 1368 . . . 1706 | 339 |
| LTR | 1986 . . . 2455 | 470 |
| M13 fwd | 3154 . . . 3170 | 17 |
| AmpR promoter | 3645 . . . 3749 | 105 |
| AmpR | 3750 . . . 4610 | 861 |
| ori | 4781 . . . 5369 | 589 |
| CAP binding site | 5657 . . . 5678 | 22 |
| lac promoter | 5693 . . . 5723 | 31 |
| lac operator | 5731 . . . 5747 | 17 |
| M13 rev | 5755 . . . 5771 | 17 |
| LTR | 6180 . . . 6773 | 594 |
| MMLV Psi | 6836 . . . 7193 | 358 |
| gag (truncated) | 7258 . . . 7674 | 417 |

[0360] In certain embodiments, the isolated nucleic acid molecule comprises nucleic acids having the sequence set forth in SEQ ID NO:958 provided below:

[SEQ ID NO: 958]
CCGGTGGTACCTCACCCTTACCGAGTCGGCGACACAGTGTGGGTCCGCCGACACCAGACTAAGAACCTAGAACCTCGCTG
GAAAGGACCTTACACAGTCCTGCTGACCACCCCCACCGCCCTCAAAGTAGACGGCATCGCAGCTTGGATACACGCCGCCC
ACGTGAAGGCTGCCGACCCCGGGGGTGGACCATCCTCTAGACTGCCATGGAAACCGACACCCTGCTGCTGTGGGTGCTGC
TGCTGTGGGTGCCAGGATCCACAGGACTGCCTGTGCTGACTCAGCCACCCTCAGCGTCTGCGACCCCCGGGCAGAGGGTC
ACCATCTCTTGTTCTGGAACCACCTCCAACATCGGAAGTAATACTGTACACTGGTACCAGCAGCTCCCAGGGACGGCCCC
CAAACTCCTCATCTATAATAATAATCAGCGGCCCTCAGGGGTCCCTGACCGATTCTCTGGCTCCAAGTCTGGCACCTCAG
CCTCCCTGGCCATCAGTGGGCTCCGGTCCGAGGATGAGGCTACATATTCCTGTGCAACATGGGATGACAGCCTGAGTGGT
GTGGTCTTCGGCGGAGGGACCAAGCTGACCGTCCTAGGTTCTAGAGGTGGTGGTGGTAGCGGCGGCGGCGGCTCTGGTGG
TGGTGGATCCCTCGAGATGGCCGAGGTCCAGCTGGTGCAGTCTGGGGCTGAGGTGAAGAAGCCTGGGTCCTCGGTGAAGG
TCTCCTGCAAGGCTTCTGGAGGCACCTTCAGCAGCTATGCTATCAGCTGGGTGCGACAGGCCCCTGGACAAGGGCTTGAG
TGGATGGGAGGGATCATCCCTATCTTTGGTACAGCAAACTACGCACAGAAGTTCCAGGGCAGAGTCACGATTACCGCGGA
CGAATCCACGAGCACAGCCTACATGGAGCTGAGCAGCCTGAGATCTGAGGACACGGCCGTGTATTACTGTGCGAGAGATC
CCGCCTACGGTGACTACGAGTATGATGCTTTTGATATCTGGGGCCAAGGGACAATGGTCACCGTCTCTTCAGCGGCCGCA
CCCACCACGACGCCAGCGCCGCGACCACCAACCCCGGCGCCCACGATCGCGTCGCAGCCCCTGTCCCTGCGCCCAGAGGC
GTGCCGGCCAGCGGCGGGGGGCGCAGTGCACACGAGGGGGCTGGACTTCGCCTGTGATATCTACATCTGGGCGCCCCTGG
CCGGGACTTGTGGGGTCCTTCTCCTGTCACTGGTTATCACCCTTTACTGCAACAAACGGGGCAGAAAGAAGCTCCTGTAT
ATATTCAAACAACCATTTATGAGACCAGTACAAACTACTCAAGAGGAAGATGGCTGTAGCTGCCGATTTCCAGAAGAAGA
AGAAGGAGGATGTGAACTGAGAGTGAAGTTCAGCAGGAGCGCAGAGCCCCCCGCGTACCAGCAGGGCCAGAACCAGCTCT
ATAACGAGCTCAATCTAGGACGAAGAGAGGAGTACGATGTTTTGGACAAGAGACGTGGCCGGGACCCTGAGATGGGGGGA
AAGCCGAGAAGGAAGAACCCTCAGGAAGGCCTGTACAATGAACTGCAGAAAGATAAGATGGCGGAGGCCTACAGTGAGAT
TGGGATGAAAGGCGAGCGCCGGAGGGGCAAGGGGCACGATGGCCTTTACCAGGGTCTCAGTACAGCCACCAAGGACACCT
ACGACGCCCTTCACATGCAGGCCCTGCCCCCTCGCTAACAGCCACTCGAGGATCCGGATTAGTCCAATTTGTTAAAGACA
GGATATCAGTGGTCCAGGCTCTAGTTTTGACTCAACAATATCACCAGCTGAAGCCTATAGAGTACGAGCCATAGATAAAA
TAAAAGATTTTATTTAGTCTCCAGAAAAAGGGGGGAATGAAAGACCCCACCTGTAGGTTTGGCAAGCTAGCTTAAGTAAC
GCCATTTTGCAAGGCATGGAAAAATACATAACTGAGAATAGAGAAGTTCAGATCAAGGTCAGGAACAGATGGAACAGCTG
AATATGGGCCAAACAGGATATCTGTGGTAAGCAGTTCCTGCCCCGGCTCAGGGCCAAGAACAGATGGAACAGCTGAATAT
GGGCCAAACAGGATATCTGTGGTAAGCAGTTCCTGCCCCGGCTCAGGGCCAAGAACAGATGGTCCCCAGATGCGGTCCAG
CCCTCAGCAGTTTCTAGAGAACCATCAGATGTTTCCAGGGTGCCCCAAGGACCTGAAATGACCCTGTGCCTTATTTGAAC
TAACCAATCAGTTCGCTTCTCGCTTCTGTTCGCGCGCTTCTGCTCCCCGAGCTCAATAAAAGAGCCCACAACCCCTCACT
CGGGGCGCCAGTCCTCCGATTGACTGAGTCGCCCGGGTACCCGTGTATCCAATAAACCCTCTTGCAGTTGCATCCGACTT
GTGGTCTCGCTGTTCCTTGGGAGGGTCTCCTCTGAGTGATTGACTACCCGTCAGCGGGGGTCTTTCACACATGCAGCATG
TATCAAAATTAATTTGGTTTTTTTTCTTAAGTATTTACATTAAATGGCCATAGTACTTAAAGTTACATTGGCTTCCTTGA
AATAAACATGGAGTATTCAGAATGTGTCATAAATATTTCTAATTTTAAGATAGTATCTCCATTGGCTTTCTACTTTTTCT
TTTATTTTTTTTTGTCCTCTGTCTTCCATTTGTTGTTGTTGTTGTTTGTTTGTTTGTTTGTTGGTTGGTTGGTTAATTTT
TTTTTAAAGATCCTACACTATAGTTCAAGCTAGACTATTAGCTACTCTGTAACCCAGGGTGACCTTGAAGTCATGGGTAG
CCTGCTGTTTTAGCCTTCCCACATCTAAGATTACAGGTATGAGCTATCATTTTTGGTATATTGATTGATTGATTGATTGA
TGTGTGTGTGTGTGATTGTGTTTGTGTGTGTGACTGTGAAAATGTGTGTATGGGTGTGTGTGAATGTGTGTATGTATGTG
TGTGTGTGAGTGTGTGTGTGTGTGTGTGCATGTGTGTGTGTGTGACTGTGTCTATGTGTATGACTGTGTGTGTGTGTGTG
TGTGTGTGTGTGTGTGTGTGTGTGTGTGTGTTGTGAAAAAATATTCTATGGTAGTGAGAGCCAACGCTCCGGCTCAGGTG
TCAGGTTGGTTTTTGAGACAGAGTCTTTCACTTAGCTTGGAATTCACTGGCCGTCGTTTTACAACGTCGTGACTGGGAAA
ACCCTGGCGTTACCCAACTTAATCGCCTTGCAGCACATCCCCCTTTCGCCAGCTGGCGTAATAGCGAAGAGGCCCGCACC
GATCGCCCTTCCCAACAGTTGCGCAGCCTGAATGGCGAATGGCGCCTGATGCGGTATTTTCTCCTTACGCATCTGTGCGG
TATTTCACACCGCATATGGTGCACTCTCAGTACAATCTGCTCTGATGCCGCATAGTTAAGCCAGCCCCGACACCCGCCAA
CACCCGCTGACGCGCCCTGACGGGCTTGTCTGCTCCCGGCATCCGCTTACAGACAAGCTGTGACCGTCTCCGGGAGCTGC
ATGTGTCAGAGGTTTTCACCGTCATCACCGAAACGCGCGATGACGAAAGGGCCTCGTGATACGCCTATTTTTATAGGTTA
ATGTCATGATAATAATGGTTTCTTAGACGTCAGGTGGCACTTTTCGGGGAAATGTGCGCGGAACCCCTATTTGTTTATTT
TTCTAAATACATTCAAATATGTATCCGCTCATGAGACAATAACCCTGATAAATGCTTCAATAATATTGAAAAAGGAAGAG
TATGAGTATTCAACATTTCCGTGTCGCCCTTATTCCCTTTTTTGCGGCATTTTGCCTTCCTGTTTTTGCTCACCCAGAAA
CGCTGGTGAAAGTAAAAGATGCTGAAGATCAGTTGGGTGCACGAGTGGGTTACATCGAACTGGATCTCAACAGCGGTAAG
ATCCTTGAGAGTTTTCGCCCCGAAGAACGTTTTCCAATGATGAGCACTTTTAAAGTTCTGCTATGTGGCGCGGTATTATC
CCGTATTGACGCCGGGCAAGAGCAACTCGGTCGCCGCATACACTATTCTCAGAATGACTTGGTTGAGTACTCACCAGTCA
CAGAAAAGCATCTTACGGATGGCATGACAGTAAGAGAATTATGCAGTGCTGCCATAACCATGAGTGATAACACTGCGGCC
AACTTACTTCTGACAACGATCGGAGGACCGAAGGAGCTAACCGCTTTTTTGCACAACATGGGGGATCATGTAACTCGCCT
TGATCGTTGGGAACCGGAGCTGAATGAAGCCATACCAAACGACGAGCGTGACACCACGATGCCTGTAGCAATGGCAACAA
CGTTGCGCAAACTATTAACTGGCGAACTACTTACTCTAGCTTCCCGGCAACAATTAATAGACTGGATGGAGGCGGATAAA
GTTGCAGGACCACTTCTGCGCTCGGCCCTTCCGGCTGGCTGGTTTATTGCTGATAAATCTGGAGCCGGTGAGCGTGGGTC
TCGCGGTATCATTGCAGCACTGGGGCCAGATGGTAAGCCCTCCCGTATCGTAGTTATCTACACGACGGGGAGTCAGGCAA
CTATGGATGAACGAAATAGACAGATCGCTGAGATAGGTGCCTCACTGATTAAGCATTGGTAACTGTCAGACCAAGTTTAC
TCATATATACTTTAGATTGATTTAAAACTTCATTTTTAATTTAAAAGGATCTAGGTGAAGATCCTTTTTGATAATCTCAT
GACCAAAATCCCTTAACGTGAGTTTTCGTTCCACTGAGCGTCAGACCCCGTAGAAAAGATCAAAGGATCTTCTTGAGATC
CTTTTTTTCTGCGCGTAATCTGCTGCTTGCAAACAAAAAAACCACCGCTACCAGCGGTGGTTTGTTTGCCGGATCAAGAG
CTACCAACTCTTTTTCCGAAGGTAACTGGCTTCAGCAGAGCGCAGATACCAAATACTGTCCTTCTAGTGTAGCCGTAGTT
AGGCCACCACTTCAAGAACTCTGTAGCACCGCCTACATACCTCGCTCTGCTAATCCTGTTACCAGTGGCTGCTGCCAGTG
GCGATAAGTCGTGTCTTACCGGGTTGGACTCAAGACGATAGTTACCGGATAAGGCGCAGCGGTCGGGCTGAACGGGGGGT
TCGTGCACACAGCCCAGCTTGGAGCGAACGACCTACACCGAACTGAGATACCTACAGCGTGAGCATTGAGAAAGCGCCAC
GCTTCCCGAAGGGAGAAAGGCGGACAGGTATCCGGTAAGCGGCAGGGTCGGAACAGGAGAGCGCACGAGGGAGCTTCCAG
GGGGAAACGCCTGGTATCTTTATAGTCCTGTCGGGTTTCGCCACCTCTGACTTGAGCGTCGATTTTTGTGATGCTCGTCA
GGGGGGCGGAGCCTATGGAAAAACGCCAGCAACGCGGCCTTTTTACGGTTCCTGGCCTTTTGCTGGCCTTTTGCTCACAT
GTTCTTTCCTGCGTTATCCCCTGATTCTGTGGATAACCGTATTACCGCCTTTGAGTGAGCTGATACCGCTCGCCGCAGCC
GAACGACCGAGCGCAGCGAGTCAGTGAGCGAGGAAGCGGAAGAGCGCCCAATACGCAAACCGCCTCTCCCCGCGCGTTGG
CCGATTCATTAATGCAGCTGGCACGACAGGTTTCCCGACTGGAAAGCGGGCAGTGAGCGCAACGCAATTAATGTGAGTTA
GCTCACTCATTAGGCACCCCAGGCTTTACACTTTATGCTTCCGGCTCGTATGTTGTGTGGAATTGTGAGCGGATAACAAT
TTCACACAGGAAACAGCTATGACCATGATTACGCCAAGCTTTGCTCTTAGGAGTTTCCTAATACATCCCAAACTCAAATA
TATAAAGCATTTGACTTGTTCTATGCCCTAGGGGGCGGGGGGAAGCTAAGCCAGCTTTTTTTAACATTTAAAATGTTAAT
TCCATTTTAAATGCACAGATGTTTTTATTTCATAAGGGTTTCAATGTGCATGAATGCTGCAATATTCCTGTTACCAAAGC
TAGTATAAATAAAAATAGATAAACGTGGAAATTACTTAGAGTTTCTGTCATTAACGTTTCCTTCCTCAGTTGACAACATA
AATGCGCTGCTGAGCAAGCCAGTTTGCATCTGTCAGGATCAATTTCCCATTATGCCAGTCATATTAATTACTAGTCAATT
AGTTGATTTTTATTTTTGACATATACATGTGAATGAAAGACCCCACCTGTAGGTTTGGCAAGCTAGCTTAAGTAACGCCA
TTTTGCAAGGCATGGAAAAATACATAACTGAGAATAGAAAAGTTCAGATCAAGGTCAGGAACAGATGGAACAGCTGAATA
TGGGCCAAACAGGATATCTGTGGTAAGCAGTTCCTGCCCCGGCTCAGGGCCAAGAACAGATGGAACAGCTGAATATGGGC
CAAACAGGATATCTGTGGTAAGCAGTTCCTGCCCCGGCTCAGGGCCAAGAACAGATGGTCCCCAGATGCGGTCCAGCCCT
CAGCAGTTTCTAGAGAACCATCAGATGTTTCCAGGGTGCCCCAAGGACCTGAAATGACCCTGTGCCTTATTTGAACTAAC
CAATCAGTTCGCTTCTCGCTTCTGTTCGCGCGCTTATGCTCCCCGAGCTCAATAAAAGAGCCCACAACCCCTCACTCGGG
GCGCCAGTCCTCCGATTGACTGAGTCGCCCGGGTACCCGTGTATCCAATAAACCCTCTTGCAGTTGCATCCGACTTGTGG
TCTCGCTGTTCCTTGGGAGGGTCTCCTCTGAGTGATTGACTACCCGTCAGCGGGGGTCTTTCATTTGGGGGCTCGTCCGG
GATCGGGAGACCCCTGCCCAGGGACCACCGACCCACCACCGGGAGGTAAGCTGGCCAGCAACTTATCTGTGTCTGTCCGA
TTGTCTAGTGTCTATGACTGATTTTATGCGCCTGCGTCGGTACTAGTTAGCTAACTAGCTCTGTATCTGGCGGACCCGTG
GTGGAACTGACGAGTTCGGAACACCCGGCCGCAACCCTGGGAGACGTCCCAGGGACTTCGGGGGCCGTTTTTGTGGCCCG
ACCTGAGTCCTAAAATCCCGATCGTTTAGGACTCTTTGGTGCACCCCCCTTAGAGGAGGGATATGTGGTTCTGGTAGGAG
ACGAGAACCTAAAACAGTTCCCGCCTCCGTCTGAATTTTTGCTTTCGGTTTGGGACCGAAGCCGCGCCGCGCGTCTTGTC
TGCTGCAGCATCGTTCTGTGTTGTCTCTGTCTGACTGTGTTTCTGTATTTGTCTGAAAATATGGGCCCGGGCTAGACTGT
TACCACTCCCTTAAGTTTGACCTTAGGTCACTGGAAAGATGTCGAGCGGATCGCTCACAACCAGTCGGTAGATGTCAAGA
AGAGACGTTGGGTTACCTTCTGCTCTGCAGAATGGCCAACCTTTAACGTCGGATGGCCGCGAGACGGCACCTTTAACCGA
GACCTCATCACCCAGGTTAAGATCAAGGTCTTTTCACCTGGCCCGCATGGACACCCAGACCAGGTCCCCTACATCGTGAC
CTGGGAAGCCTTGGCTTTTGACCCCCCTCCCTGGGTCAAGCCCTTTGTACACCCTAAGCCTCCGCCTCCTCTTCCTCCAT
CCGCCCCGTCTCTCCCCCTTGAACCTCCTCGTTCGACCCCGCCTCGATCCTCCCTTTATCCAGCCCTCACTCCTTCTCTA
GGCGCCCCCATATGGCCATATGAGATCTTATATGGGGCACCCCCGCCCCTTGTAAACTTCCCTGACCCTGACATGACAAG
AGTTACTAACAGCCCCTCTCTCCAAGCTCACTTACAGGCTCTCTACTTAGTCCAGCACGAAGTCTGGAGACCTCTGGCGG
CAGCCTACCAAGAACAACTGGACCGA.

[0361] The isolated nucleic acid molecule having the nucleotide sequence of SEQ ID NO:958 encodes a FcRL-5-targeted CAR (designated as 109 FcRL5-targeted BBz CAR) comprising a fully human scFv (encoded by nucleotides 207-1031) that comprises a heavy chain variable region comprising amino acids having the sequence set forth in SEQ ID NO:236, a light chain variable region comprising amino acids having the sequence set forth in SEQ ID NO:235, and a linker having an amino acid sequence of SEQ ID NO:307 positioned between the heavy chain variable region and the light chain variable region, a transmembrane domain comprising a CD8 polypeptide having 137 to 207 of SEQ ID NO: 960, and an intracellular domain comprising a CD3 polypeptide comprising amino acids 52 to 163 of SEQ ID NO: 941, and a co-stimulatory signaling region comprising a 4-1BB polypeptide having amino acids 214-255 of SEQ ID NO: 943. Nucleotides 207-1031 of SEQ ID NO: 957 encodes the human scFv. Nucleotides 1041-1253 of SEQ ID NO: 958 encodes the CD8 polypeptide comprised in the transmembrane domain. Nucleotides 1254-1379 of SEQ ID NO: 958 encodes the 4-1BB polypeptide comprised in the intracellular domain. Nucleotides 1380-1718 of SEQ ID NO: 958 encodes the CD3zeta polypeptide comprised in the intracellular domain. Other portions of SEQ ID NO: 958 are shown in Table 237.

TABLE 237

| | Nucleotide Sequence | |
|---|---|---|
| | Positions of SEQ ID | |
| Portions | NO: 958 | Number of Nucleotides |
| anti-FcRL5 scFv 109 | 207 . . . 1031 | 825 |
| CD8a TM | 1041 . . . 1253 | 213 |
| 4-1BB | 1254 . . . 1379 | 126 |
| CD3zeta | 1380 . . . 1718 | 339 |
| LTR | 1998 . . . 2467 | 470 |
| M13 fwd | 3166 . . . 3182 | 17 |
| AmpR promoter | 3657 . . . 3761 | 105 |
| AmpR | 3762 . . . 4622 | 861 |
| ori | 4793 . . . 5381 | 589 |
| CAP binding site | 5669 . . . 5690 | 22 |
| lac promoter | 5705 . . . 5735 | 31 |
| lac operator | 5743 . . . 5759 | 17 |
| M13 rev | 5767 . . . 5783 | 17 |
| LTR | 6192 . . . 6785 | 594 |
| MMLV Psi | 6848 . . . 7205 | 358 |
| gag (truncated) | 7270 . . . 7686 | 417 |

[0362] In certain embodiments, the isolated nucleic acid molecule comprises nucleic acids having the sequence set forth in SEQ ID NO:959 provided below:

[SEQ ID NO: 959]
CCGGTGGTACCTCACCCTTACCGAGTCGGCGACACAGTGTGGGTCCGCCGACACCAGACTAAGAACCTAGAACCTCGCTG
GAAAGGACCTTACACAGTCCTGCTGACCACCCCCACCGCCCTCAAAGTAGACGGCATCGCAGCTTGGATACACGCCGCCC
ACGTGAAGGCTGCCGACCCCGGGGGTGGACCATCCTCTAGACTGCCATGGAAACCGATACACTGCTGCTGTGGGTGCTGC
TGCTGTGGGTGCCAGGATCCACAGGCGATGTTGTGATGACTCAGTCTCCACCCTCCCTGTCCGTCACCCCTGGAGAGCCG
GCCTCCATCACCTGCAGGTCTAGTCAGAGCCTCCTGGAAAGAAATGCATACAACTACTTGGATTGGTACCTGCAGAGGCC
AGGACAGTCTCCACAGCTCCTGATCTACTTGGGTTCTAATCGGGCCGCCGGGGTCCCTGACAGGTTCAGTGGCAGTGGAT
CAGGCAGAGATTTTACACTGAAAATCAGCAGAGTGGAGCCTGAGGATGTTGGGGTTTATTACTGCATGCAAGCTCTACAA
GCTCCGTTCACTTTCGGCGGAGGGACCAAGGTGGAGATCAAACGTTCTAGAGGTGGTGGTGGTAGCGGCGGCGGCGGCTC
TGGTGGTGGTGGATCCCTCGAGATGGCCGAAGTGCAGCTGGTGCAGTCTGGGGGAGGCTTGGTACAGCCTGGGGGGTCCC
TGAGACTCTCCTGTGCAGCCTCTGGATTCACCTTTAGCAGCTATGCCATGAGCTGGGTCCGCCAGGCTCCAGGGAAGGGG
CTGGAGTGGGTCTCAGCTATTAGTGGTAGTGGTGGTAGCACATACTACGCAGACTCCGTGAAGGGCCGGTTCACCATCTC
CAGAGACAATTCCAAGAACACGCTGTATCTGCAAATGAACAGCCTGAGAGCCGAGGACACGGCCGTATATTACTGTGCGA
AATGGGGCCCGTTTCAGGATGCTTTTGATATCTGGGGCCAAGGGACAATGGTCACCGTCTCTTCAGCGGCCGCACCCACC
ACGACGCCAGCGCCGCGACCACCAACCCCGGCGCCCACGATCGCGTCGCAGCCCCTGTCCCTGCGCCCAGAGGCGTGCCG
GCCAGCGGCGGGGGGCGCAGTGCACACGAGGGGGCTGGACTTCGCCTGTGATATCTACATCTGGGCGCCCCTGGCCGGGA
CTTGTGGGGTCCTTCTCCTGTCACTGGTTATCACCCTTTACTGCAACAAACGGGGCAGAAAGAAGCTCCTGTATATATTC
AAACAACCATTTATGAGACCAGTACAAACTACTCAAGAGGAAGATGGCTGTAGCTGCCGATTTCCAGAAGAAGAAGAAGG
AGGATGTGAACTGAGAGTGAAGTTCAGCAGGAGCGCAGAGCCCCCCGCGTACCAGCAGGGCCAGAACCAGCTCTATAACG
AGCTCAATCTAGGACGAAGAGAGGAGTACGATGTTTTGGACAAGAGACGTGGCCGGGACCCTGAGATGGGGGGAAAGCCG
AGAAGGAAGAACCCTCAGGAAGGCCTGTACAATGAACTGCAGAAAGATAAGATGGCGGAGGCCTACAGTGAGATTGGGAT
GAAAGGCGAGCGCCGGAGGGGCAAGGGGCACGATGGCCTTTACCAGGGTCTCAGTACAGCCACCAAGGACACCTACGACG
CCCTTCACATGCAGGCCCTGCCCCCTCGCTAACAGCCACTCGAGGATCCGGATTAGTCCAATTTGTTAAAGACAGGATAT
CAGTGGTCCAGGCTCTAGTTTTGACTCAACAATATCACCAGCTGAAGCCTATAGAGTACGAGCCATAGATAAAATAAAAG
ATTTTATTTAGTCTCCAGAAAAAGGGGGGAATGAAAGACCCCACCTGTAGGTTTGGCAAGCTAGCTTAAGTAACGCCATT
TTGCAAGGCATGGAAAAATACATAACTGAGAATAGAGAAGTTCAGATCAAGGTCAGGAACAGATGGAACAGCTGAATATG
GGCCAAACAGGATATCTGTGGTAAGCAGTTCCTGCCCCGGCTCAGGGCCAAGAACAGATGGAACAGCTGAATATGGGCCA
AACAGGATATCTGTGGTAAGCAGTTCCTGCCCCGGCTCAGGGCCAAGAACAGATGGTCCCCAGATGCGGTCCAGCCCTCA
GCAGTTTCTAGAGAACCATCAGATGTTTCCAGGGTGCCCCAAGGACCTGAAATGACCCTGTGCCTTATTTGAACTAACCA
ATCAGTTCGCTTCTCGCTTCTGTTCGCGCGCTTCTGCTCCCCGAGCTCAATAAAAGAGCCCACAACCCCTCACTCGGGGC
GCCAGTCCTCCGATTGACTGAGTCGCCCGGGTACCCGTGTATCCAATAAACCCTCTTGCAGTTGCATCCGACTTGTGGTC
TCGCTGTTCCTTGGGAGGGTCTCCTCTGAGTGATTGACTACCCGTCAGCGGGGGTCTTTCACACATGCAGCATGTATCAA
AATTAATTTGGTTTTTTTTCTTAAGTATTTACATTAAATGGCCATAGTACTTAAAGTTACATTGGCTTCCTTGAAATAAA
CATGGAGTATTCAGAATGTGTCATAAATATTTCTAATTTTAAGATAGTATCTCCATTGGCTTTCTACTTTTTCTTTTATT
TTTTTTTGTCCTCTGTCTTCCATTTGTTGTTGTTGTTGTTTGTTTGTTTGTTTGTTGGTTGGTTGGTTAATTTTTTTTTA
AAGATCCTACACTATAGTTCAAGCTAGACTATTAGCTACTCTGTAACCCAGGGTGACCTTGAAGTCATGGGTAGCCTGCT
GTTTTAGCCTTCCCACATCTAAGATTACAGGTATGAGCTATCATTTTTGGTATATTGATTGATTGATTGATTGATGTGTG
TGTGTGTGATTGTGTTTGTGTGTGTGACTGTGAAAATGTGTGTATGGGTGTGTGTGAATGTGTGTATGTATGTGTGTGTG
TGAGTGTGTGTGTGTGTGTGTGCATGTGTGTGTGTGTGACTGTGTCTATGTGTATGACTGTGTGTGTGTGTGTGTGTGTG
TGTGTGTGTGTGTGTGTGTGTGTGTTGTGAAAAAATATTCTATGGTAGTGAGAGCCAACGCTCCGGCTCAGGTGTCAGGT
TGGTTTTTGAGACAGAGTCTTTCACTTAGCTTGGAATTCACTGGCCGTCGTTTTACAACGTCGTGACTGGGAAAACCCTG
GCGTTACCCAACTTAATCGCCTTGCAGCACATCCCCCTTTCGCCAGCTGGCGTAATAGCGAAGAGGCCCGCACCGATCGC
CCTTCCCAACAGTTGCGCAGCCTGAATGGCGAATGGCGCCTGATGCGGTATTTTCTCCTTACGCATCTGTGCGGTATTTC
ACACCGCATATGGTGCACTCTCAGTACAATCTGCTCTGATGCCGCATAGTTAAGCCAGCCCCGACACCCGCCAACACCCG
CTGACGCGCCCTGACGGGCTTGTCTGCTCCCGGCATCCGCTTACAGACAAGCTGTGACCGTCTCCGGGAGCTGCATGTGT
CAGAGGTTTTCACCGTCATCACCGAAACGCGCGATGACGAAAGGGCCTCGTGATACGCCTATTTTTATAGGTTAATGTCA
TGATAATAATGGTTTCTTAGACGTCAGGTGGCACTTTTCGGGGAAATGTGCGCGGAACCCCTATTTGTTTATTTTTCTAA
ATACATTCAAATATGTATCCGCTCATGAGACAATAACCCTGATAAATGCTTCAATAATATTGAAAAAGGAAGAGTATGAG
TATTCAACATTTCCGTGTCGCCCTTATTCCCTTTTTTGCGGCATTTTGCCTTCCTGTTTTTGCTCACCCAGAAACGCTGG
TGAAAGTAAAAGATGCTGAAGATCAGTTGGGTGCACGAGTGGGTTACATCGAACTGGATCTCAACAGCGGTAAGATCCTT
GAGAGTTTTCGCCCCGAAGAACGTTTTCCAATGATGAGCACTTTTAAAGTTCTGCTATGTGGCGCGGTATTATCCCGTAT
TGACGCCGGGCAAGAGCAACTCGGTCGCCGCATACACTATTCTCAGAATGACTTGGTTGAGTACTCACCAGTCACAGAAA
AGCATCTTACGGATGGCATGACAGTAAGAGAATTATGCAGTGCTGCCATAACCATGAGTGATAACACTGCGGCCAACTTA
CTTCTGACAACGATCGGAGGACCGAAGGAGCTAACCGCTTTTTTGCACAACATGGGGGATCATGTAACTCGCCTTGATCG
TTGGGAACCGGAGCTGAATGAAGCCATACCAAACGACGAGCGTGACACCACGATGCCTGTAGCAATGGCAACAACGTTGC
GCAAACTATTAACTGGCGAACTACTTACTCTAGCTTCCCGGCAACAATTAATAGACTGGATGGAGGCGGATAAAGTTGCA
GGACCACTTCTGCGCTCGGCCCTTCCGGCTGGCTGGTTTATTGCTGATAAATCTGGAGCCGGTGAGCGTGGGTCTCGCGG
TATCATTGCAGCACTGGGGCCAGATGGTAAGCCCTCCCGTATCGTAGTTATCTACACGACGGGGAGTCAGGCAACTATGG
ATGAACGAAATAGACAGATCGCTGAGATAGGTGCCTCACTGATTAAGCATTGGTAACTGTCAGACCAAGTTTACTCATAT
ATACTTTAGATTGATTTAAAACTTCATTTTTAATTTAAAAGGATCTAGGTGAAGATCCTTTTTGATAATCTCATGACCAA
AATCCCTTAACGTGAGTTTTCGTTCCACTGAGCGTCAGACCCCGTAGAAAAGATCAAAGGATCTTCTTGAGATCCTTTTT
TTCTGCGCGTAATCTGCTGCTTGCAAACAAAAAAACCACCGCTACCAGCGGTGGTTTGTTTGCCGGATCAAGAGCTACCA
ACTCTTTTTCCGAAGGTAACTGGCTTCAGCAGAGCGCAGATACCAAATACTGTCCTTCTAGTGTAGCCGTAGTTAGGCCA
CCACTTCAAGAACTCTGTAGCACCGCCTACATACCTCGCTCTGCTAATCCTGTTACCAGTGGCTGCTGCCAGTGGCGATA
AGTCGTGTCTTACCGGGTTGGACTCAAGACGATAGTTACCGGATAAGGCGCAGCGGTCGGGCTGAACGGGGGGTTCGTGC
ACACAGCCCAGCTTGGAGCGAACGACCTACACCGAACTGAGATACCTACAGCGTGAGCATTGAGAAAGCGCCACGCTTCC
CGAAGGGAGAAAGGCGGACAGGTATCCGGTAAGCGGCAGGGTCGGAACAGGAGAGCGCACGAGGGAGCTTCCAGGGGGAA
ACGCCTGGTATCTTTATAGTCCTGTCGGGTTTCGCCACCTCTGACTTGAGCGTCGATTTTTGTGATGCTCGTCAGGGGGG
CGGAGCCTATGGAAAAACGCCAGCAACGCGGCCTTTTTACGGTTCCTGGCCTTTTGCTGGCCTTTTGCTCACATGTTCTT
TCCTGCGTTATCCCCTGATTCTGTGGATAACCGTATTACCGCCTTTGAGTGAGCTGATACCGCTCGCCGCAGCCGAACGA
CCGAGCGCAGCGAGTCAGTGAGCGAGGAAGCGGAAGAGCGCCCAATACGCAAACCGCCTCTCCCCGCGCGTTGGCCGATT
CATTAATGCAGCTGGCACGACAGGTTTCCCGACTGGAAAGCGGGCAGTGAGCGCAACGCAATTAATGTGAGTTAGCTCAC
TCATTAGGCACCCCAGGCTTTACACTTTATGCTTCCGGCTCGTATGTTGTGTGGAATTGTGAGCGGATAACAATTTCACA
CAGGAAACAGCTATGACCATGATTACGCCAAGCTTTGCTCTTAGGAGTTTCCTAATACATCCCAAACTCAAATATATAAA
GCATTTGACTTGTTCTATGCCCTAGGGGGCGGGGGGAAGCTAAGCCAGCTTTTTTTAACATTTAAAATGTTAATTCCATT
TTAAATGCACAGATGTTTTTATTTCATAAGGGTTTCAATGTGCATGAATGCTGCAATATTCCTGTTACCAAAGCTAGTAT
AAATAAAAATAGATAAACGTGGAAATTACTTAGAGTTTCTGTCATTAACGTTTCCTTCCTCAGTTGACAACATAAATGCG
CTGCTGAGCAAGCCAGTTTGCATCTGTCAGGATCAATTTCCCATTATGCCAGTCATATTAATTACTAGTCAATTAGTTGA
TTTTTATTTTTGACATATACATGTGAATGAAAGACCCCACCTGTAGGTTTGGCAAGCTAGCTTAAGTAACGCCATTTTGC
AAGGCATGGAAAAATACATAACTGAGAATAGAAAAGTTCAGATCAAGGTCAGGAACAGATGGAACAGCTGAATATGGGCC
AAACAGGATATCTGTGGTAAGCAGTTCCTGCCCCGGCTCAGGGCCAAGAACAGATGGAACAGCTGAATATGGGCCAAACA
GGATATCTGTGGTAAGCAGTTCCTGCCCCGGCTCAGGGCCAAGAACAGATGGTCCCCAGATGCGGTCCAGCCCTCAGCAG
TTTCTAGAGAACCATCAGATGTTTCCAGGGTGCCCCAAGGACCTGAAATGACCCTGTGCCTTATTTGAACTAACCAATCA
GTTCGCTTCTCGCTTCTGTTCGCGCGCTTATGCTCCCCGAGCTCAATAAAAGAGCCCACAACCCCTCACTCGGGGCGCCA
GTCCTCCGATTGACTGAGTCGCCCGGGTACCCGTGTATCCAATAAACCCTCTTGCAGTTGCATCCGACTTGTGGTCTCGC
TGTTCCTTGGGAGGGTCTCCTCTGAGTGATTGACTACCCGTCAGCGGGGGTCTTTCATTTGGGGGCTCGTCCGGGATCGG
GAGACCCCTGCCCAGGGACCACCGACCCACCACCGGGAGGTAAGCTGGCCAGCAACTTATCTGTGTCTGTCCGATTGTCT
AGTGTCTATGACTGATTTTATGCGCCTGCGTCGGTACTAGTTAGCTAACTAGCTCTGTATCTGGCGGACCCGTGGTGGAA
CTGACGAGTTCGGAACACCCGGCCGCAACCCTGGGAGACGTCCCAGGGACTTCGGGGGCCGTTTTTGTGGCCCGACCTGA
GTCCTAAAATCCCGATCGTTTAGGACTCTTTGGTGCACCCCCCTTAGAGGAGGGATATGTGGTTCTGGTAGGAGACGAGA
ACCTAAAACAGTTCCCGCCTCCGTCTGAATTTTTGCTTTCGGTTTGGGACCGAAGCCGCGCCGCGCGTCTTGTCTGCTGC
AGCATCGTTCTGTGTTGTCTCTGTCTGACTGTGTTTCTGTATTTGTCTGAAAATATGGGCCCGGGCTAGACTGTTACCAC
TCCCTTAAGTTTGACCTTAGGTCACTGGAAAGATGTCGAGCGGATCGCTCACAACCAGTCGGTAGATGTCAAGAAGAGAC
GTTGGGTTACCTTCTGCTCTGCAGAATGGCCAACCTTTAACGTCGGATGGCCGCGAGACGGCACCTTTAACCGAGACCTC
ATCACCCAGGTTAAGATCAAGGTCTTTTCACCTGGCCCGCATGGACACCCAGACCAGGTCCCCTACATCGTGACCTGGGA
AGCCTTGGCTTTTGACCCCCCTCCCTGGGTCAAGCCCTTTGTACACCCTAAGCCTCCGCCTCCTCTTCCTCCATCCGCCC
CGTCTCTCCCCCTTGAACCTCCTCGTTCGACCCCGCCTCGATCCTCCCTTTATCCAGCCCTCACTCCTTCTCTAGGCGCC
CCCATATGGCCATATGAGATCTTATATGGGGCACCCCCGCCCCTTGTAAACTTCCCTGACCCTGACATGACAAGAGTTAC
TAACAGCCCCTCTCTCCAAGCTCACTTACAGGCTCTCTACTTAGTCCAGCACGAAGTCTGGAGACCTCTGGCGGCAGCCT
ACCAAGAACAACTGGACCGA.

[0363] The isolated nucleic acid molecule having the nucleotide sequence of SEQ ID NO:959 encodes a FcRL-5-targeted CAR (designated as 117 FcRL5-targeted BBz CAR) comprising a fully human scFv (encoded by nucleotides 207-1025 of SEQ ID NO:959) that comprises a heavy chain variable region comprising amino acids having the sequence set forth in SEQ ID NO:268, a light chain variable region comprising amino acids having the sequence set forth in SEQ ID NO:267, and a linker having an amino acid sequence of SEQ ID NO:307 positioned between the heavy chain variable region and the light chain variable region, a transmembrane domain comprising a CD8 polypeptide having 137 to 207 of SEQ ID NO: 960, and an intracellular domain comprising a CD3 polypeptide comprising amino acids 52 to 163 of SEQ ID NO: 941, and a co-stimulatory signaling region comprising a 4-1BB polypeptide having amino acids 214-255 of SEQ ID NO: 943. Nucleotides 207-1025 of SEQ ID NO: 959 encodes the human scFv. Nucleotides 1035-1247 of SEQ ID NO: 959 encodes the CD8 polypeptide comprised in the transmembrane domain. Nucleotides 1248-1373 of SEQ ID NO: 959 encodes the 4-1BB polypeptide comprised in the intracellular domain. Nucleotides 1374-1712 of SEQ ID NO: 959 encodes the CD3zeta polypeptide comprised in the intracellular domain. Other portions of SEQ ID NO: 959 are shown in Table 238.

TABLE 238

| | Nucleotide Sequence | |
|---|---|---|
| | Positions of SEQ ID | |
| Portions | NO: 959 | Number of Nucleotides |
| anti-FcRL5 scFv 117 | 207 . . . 1025 | 819 |
| CD8a TM | 1035 . . . 1247 | 213 |
| 4-1BB | 1248 . . . 1373 | 126 |
| CD3zeta | 1374 . . . 1712 | 339 |
| LTR | 1992 . . . 2461 | 470 |
| M13 fwd | 3160 . . . 3176 | 17 |
| AmpR promoter | 3651 . . . 3755 | 105 |
| AmpR | 3756 . . . 4616 | 861 |
| ori | 4787 . . . 5375 | 589 |
| CAP binding site | 5663 . . . 5684 | 22 |
| lac promoter | 5699 . . . 5729 | 31 |
| lac operator | 5737 . . . 5753 | 17 |
| M13 rev | 5761 . . . 5777 | 17 |
| LTR | 6186 . . . 6779 | 594 |
| MMLV Psi | 6842 . . . 7199 | 358 |
| gag (truncated) | 7264 . . . 7680 | 417 |

[0364] In certain embodiments, the isolated nucleic acid molecule encodes a functional portion of a presently disclosed FcRL5-targeted CAR. As used herein, the term “functional portion” refers to any portion, part or fragment of a presently disclosed FcRL5-targeted CAR, which portion, part or fragment retains the biological activity of the FcRL5-targeted CAR (the parent CAR). For example, functional portions encompass the portions, parts or fragments of a presently disclosed FcRL5-targeted CAR that retains the ability to recognize a target cell, to treat a disease, e.g., multiple myeloma, to a similar, same, or even a higher extent as the parent CAR. In certain embodiments, an isolated nucleic acid molecule encoding a functional portion of a presently disclosed FcRL5-targeted CAR can encode a protein comprising, e.g., about 10%, 20%, 25%, 30%, 35%, 40%, 45%, 50%, 55%, 60%, 65%, 70%, 75%, 80%, 85%, 90%, and 95%, or more of the parent CAR, e.g., of the nucleic acid sequences set forth in SEQ ID NO:951, SEQ ID NO:952, SEQ ID NO:953, SEQ ID NO:954, SEQ ID NO:955, SEQ ID NO:956, SEQ ID NO:957, SEQ ID NO:958 or SEQ ID NO:959.

### III. Immunoresponsive Cells

[0365] The presently disclosed subject matter provides immunoresponsive cells expressing a CAR that comprises an extracellular antigen-binding domain, a transmembrane domain and an intracellular domain, where the extracellular antigen-binding domain specifically binds to FcRL5 (e.g., human FcRL5), as described above. In certain embodiments, the extracellular antigen-binding domain specifically binds to domain 7 of FcRL5. In certain embodiments, the extracellular antigen-binding domain specifically binds to domain 8 of FcRL5. In certain embodiments, the extracellular antigen-binding domain specifically binds to domain 9 of FcRL5. The immunoresponsive cells can be transduced with a presently disclosed CAR such that the cells express the CAR. The presently disclosed subject matter also provides methods of using such cells for the treatment of a tumor, e.g., multiple myeloma (MM). The immunoresponsive cells of the presently disclosed subject matter can be cells of the lymphoid lineage. The lymphoid lineage, comprising B, T and natural killer (NK) cells, provides for the production of antibodies, regulation of the cellular immune system, detection of foreign agents in the blood, detection of cells foreign to the host, and the like. Non-limiting examples of immunoresponsive cells of the lymphoid lineage include T cells, Natural Killer (NK) cells, cytotoxic T lymphocytes (CTLs), regulatory T cells, embryonic stem cells, and pluripotent stem cells (e.g., those from which lymphoid cells may be differentiated). T cells can be lymphocytes that mature in the thymus and are chiefly responsible for cell-mediated immunity. T cells are involved in the adaptive immune system. The T cells of the presently disclosed subject matter can be any type of T cells, including, but not limited to, T helper cells, cytotoxic T cells, memory T cells (including central memory T cells, stem-cell-like memory T cells (or stem-like memory T cells), and two types of effector memory T cells: e.g., T_{EM} cells and T_{EMRA} cells), Regulatory T cells (also known as suppressor T cells), Natural killer T cells, Mucosal associated invariant T cells, and T6 T cells. In certain embodiments, the CAR-expressing T cells express Foxp3 to achieve and maintain a T regulatory phenotype. Natural killer (NK) cells can be lymphocytes that are part of cell-mediated immunity and act during the innate immune response. NK cells do not require prior activation in order to perform their cytotoxic effect on target cells. Cytotoxic T cells (CTL or killer T cells) are a subset of T lymphocytes capable of inducing the death of infected somatic or tumor cells.

[0366] The immunoresponsive cells of the presently disclosed subject matter can express an extracellular antigen-binding domain (e.g., an scFV, a Fab that is optionally crosslinked, or a F(ab)₂) that specifically binds to FcRL5 (e.g., human FcRL5), for the treatment of multiple myeloma. Such immunoresponsive cells can be administered to a subject (e.g., a human subject) in need thereof for the treatment of multiple myeloma. In certain embodiments, the immunoresponsive cell is a T cell. The T cell can be a CD4⁺ T cell or a CD8⁺ T cell. In certain embodiments, the T cell is a CD4⁺ T cell. In another embodiment, the T cell is a CD8⁺ T cell.

[0367] A presently disclosed immunoresponsive cell can be further transduced with at least one co-stimulatory ligand, such that the immunoresponsive cell co-expresses or is induced to co-express the FcRL5-specific CAR and the at least one co-stimulatory ligand. The interaction between the FcRL5-specific CAR and at least one co-stimulatory ligand provides a non-antigen-specific signal important for full activation of an immunoresponsive cell (e.g., T cell). Co-stimulatory ligands include, but are not limited to, members of the tumor necrosis factor (TNF) superfamily, and immunoglobulin (Ig) superfamily ligands. TNF is a cytokine involved in systemic inflammation and stimulates the acute phase reaction. Its primary role is in the regulation of immune cells. Members of TNF superfamily share a number of common features. The majority of TNF superfamily members are synthesized as type II transmembrane proteins (extracellular C-terminus) containing a short cytoplasmic segment and a relatively long extracellular region. TNF superfamily members include, without limitation, nerve growth factor (NGF), CD40L (CD40L)/CD154, CD137L/4-1BBL, TNF-α, CD134L/OX40L/CD252, CD27L/CD70, Fas ligand (FasL), CD30L/CD153, tumor necrosis factor beta (TNFβ)/lymphotoxin-alpha (LTα), lymphotoxin-beta (LTβ), CD257/B cell-activating factor (BAFF)/Blys/THANK/Tall-1, glucocorticoid-induced TNF Receptor ligand (GITRL), and TNF-related apoptosis-inducing ligand (TRAIL), LIGHT (TNFSF14). The immunoglobulin (Ig) superfamily is a large group of cell surface and soluble proteins that are involved in the recognition, binding, or adhesion processes of cells. These proteins share structural features with immunoglobulins—they possess an immunoglobulin domain (fold). Immunoglobulin superfamily ligands include, but are not limited to, CD80 and CD86, both ligands for CD28, PD-L1/(B7-H1) that ligands for PD-1. In certain embodiments, the at least one co-stimulatory ligand is selected from the group consisting of 4-1BBL, CD80, CD86, CD70, OX40L, CD48, TNFRSF14, PD-L1, and combinations thereof. In certain embodiments, the immunoresponsive cell is transduced with one co-stimulatory ligand that is 4-1BBL. In certain embodiments, the immunoresponsive cell is transduced with two co-stimulatory ligands that are 4-1BBL and CD80. CARs transduced with at least one co-stimulatory ligand are described in U.S. Pat. No. 8,389,282, which is incorporated by reference in its entirety.

[0368] Furthermore, a presently disclosed immunoresponsive cell can be further transduced with at least one cytokine, such that the immunoresponsive cell secretes the at least one cytokine as well as expresses the FcRL5-specific CAR. In certain embodiments, the at least one cytokine is selected from the group consisting of IL-2, IL-3, IL-6, IL-7, IL-11, IL-12, IL-15, IL-17, and IL-21. In certain embodiments, the cytokine is IL-12.

[0369] The FcRL5-specific or FcRL5-targeted human lymphocytes that can be used in peripheral donor lymphocytes, e.g., those disclosed in Sadelain, M., et al. 2003 Nat Rev Cancer 3:35-45 (disclosing peripheral donor lymphocytes genetically modified to express CARs), in Morgan, R. A., et al. 2006 Science 314:126-129 (disclosing peripheral donor lymphocytes genetically modified to express a full-length tumor antigen-recognizing T cell receptor complex comprising the a and R heterodimer), in Panelli, M. C., et al. 2000 J Immunol 164:495-504; Panelli, M. C., et al. 2000 J Immunol 164:4382-4392 (disclosing lymphocyte cultures derived from tumor infiltrating lymphocytes (TILs) in tumor biopsies), and in Dupont, J., et al. 2005 Cancer Res 65:5417-5427; Papanicolaou, G. A., et al. 2003 Blood 102:2498-2505 (disclosing selectively in vitro-expanded antigen-specific peripheral blood leukocytes employing artificial antigen-presenting cells (AAPCs) or pulsed dendritic cells). The immunoresponsive cells (e.g., T cells) can be autologous, non-autologous (e.g., allogeneic), or derived in vitro from engineered progenitor or stem cells.

[0370] In certain embodiments, a presently disclosed immunoresponsive cell (e.g., T cell) expresses from about 1 to about 4, from about 2 to about 4, from about 3 to about 4, from about 1 to about 2, from about 1 to about 3, or from about 2 to about 3 vector copy numbers/cell of a presently disclosed FcRL5-specific CAR.

[0371] The unpurified source of CTLs may be any known in the art, such as the bone marrow, fetal, neonate or adult or other hematopoietic cell source, e.g., fetal liver, peripheral blood or umbilical cord blood. Various techniques can be employed to separate the cells. For instance, negative selection methods can remove non-CTLs initially. Monoclonal antibodies are particularly useful for identifying markers associated with particular cell lineages and/or stages of differentiation for both positive and negative selections.

[0372] A large proportion of terminally differentiated cells can be initially removed by a relatively crude separation. For example, magnetic bead separations can be used initially to remove large numbers of irrelevant cells. Preferably, at least about 80%, usually at least 70% of the total hematopoietic cells will be removed prior to cell isolation.

[0373] Procedures for separation include, but are not limited to, density gradient centrifugation; resetting; coupling to particles that modify cell density; magnetic separation with antibody-coated magnetic beads; affinity chromatography; cytotoxic agents joined to or used in conjunction with a mAb, including, but not limited to, complement and cytotoxins; and panning with antibody attached to a solid matrix, e.g. plate, chip, elutriation or any other convenient technique.

[0374] Techniques for separation and analysis include, but are not limited to, flow cytometry, which can have varying degrees of sophistication, e.g., a plurality of color channels, low angle and obtuse light scattering detecting channels, impedance channels.

[0375] The cells can be selected against dead cells, by employing dyes associated with dead cells such as propidium iodide (PI). Preferably, the cells are collected in a medium comprising 2% fetal calf serum (FCS) or 0.2% bovine serum albumin (BSA) or any other suitable, preferably sterile, isotonic medium.

### IV. Vectors

[0376] Genetic modification of immunoresponsive cells (e.g., T cells, CTL cells, NK cells) can be accomplished by transducing a substantially homogeneous cell composition with a recombinant DNA or RNA construct. The vector can be a retroviral vector (e.g., gamma retroviral), which is employed for the introduction of the DNA or RNA construct into the host cell genome. For example, a polynucleotide encoding the FcRL5-specific CAR can be cloned into a retroviral vector and expression can be driven from its endogenous promoter, from the retroviral long terminal repeat, or from an alternative internal promoter.

[0377] Non-viral vectors or RNA may be used as well. Random chromosomal integration, or targeted integration (e.g., using a nuclease, transcription activator-like effector nucleases (TALENs), Zinc-finger nucleases (ZFNs), and/or clustered regularly interspaced short palindromic repeats (CRISPRs), or transgene expression (e.g., using a natural or chemically modified RNA) can be used.

[0378] For initial genetic modification of the cells to provide FcRL5-specific CAR expressing cells, a retroviral vector is generally employed for transduction, however any other suitable viral vector or non-viral delivery system can be used. For subsequent genetic modification of the cells to provide cells comprising an antigen presenting complex comprising at least two co-stimulatory ligands, retroviral gene transfer (transduction) likewise proves effective. Combinations of retroviral vector and an appropriate packaging line are also suitable, where the capsid proteins will be functional for infecting human cells. Various amphotropic virus-producing cell lines are known, including, but not limited to, PA12 (Miller, et al. (1985) Mol. Cell. Biol. 5:431-437); PA317 (Miller, et al. (1986) Mol. Cell. Biol. 6:2895-2902); and CRIP (Danos, et al. (1988) Proc. Natl. Acad. Sci. USA 85:6460-6464). Non-amphotropic particles are suitable too, e.g., particles pseudotyped with VSVG, RD114 or GALV envelope and any other known in the art.

[0379] Possible methods of transduction also include direct co-culture of the cells with producer cells, e.g., by the method of Bregni, et al. (1992) Blood 80:1418-1422, or culturing with viral supernatant alone or concentrated vector stocks with or without appropriate growth factors and polycations, e.g., by the method of Xu, et al. (1994) Exp. Hemat. 22:223-230; and Hughes, et al. (1992) J. Clin. Invest. 89:1817.

[0380] Transducing viral vectors can be used to express a co-stimulatory ligand (e.g., 4-1BBL and IL-12) in an immunoresponsive cell. Preferably, the chosen vector exhibits high efficiency of infection and stable integration and expression (see, e.g., Cayouette et al., Human Gene Therapy 8:423-430, 1997; Kido et al., Current Eye Research 15:833-844, 1996; Bloomer et al., Journal of Virology 71:6641-6649, 1997; Naldini et al., Science 272:263 267, 1996; and Miyoshi et al., Proc. Natl. Acad. Sci. U.S.A. 94:10319, 1997). Other viral vectors that can be used include, for example, adenoviral, lentiviral, and adeno-associated viral vectors, vaccinia virus, a bovine papilloma virus, or a herpes virus, such as Epstein-Barr Virus (also see, for example, the vectors of Miller, Human Gene Therapy 15-14, 1990; Friedman, Science 244:1275-1281, 1989; Eglitis et al., BioTechniques 6:608-614, 1988; Tolstoshev et al., Current Opinion in Biotechnology 1:55-61, 1990; Sharp, The Lancet 337:1277-1278, 1991; Cornetta et al., Nucleic Acid Research and Molecular Biology 36:311-322, 1987; Anderson, Science 226:401-409, 1984; Moen, Blood Cells 17:407-416, 1991; Miller et al., Biotechnology 7:980-990, 1989; Le Gal La Salle et al., Science 259:988-990, 1993; and Johnson, Chest 107:77S-83S, 1995). Retroviral vectors are particularly well developed and have been used in clinical settings (Rosenberg et al., N. Engl. J. Med 323:370, 1990; Anderson et al., U.S. Pat. No. 5,399,346).

[0381] In certain non-limiting embodiments, the vector expressing a presently disclosed FcRL5-targeted CAR is a retroviral vector, e.g., a 293galv9 retroviral vector.

[0382] Non-viral approaches can also be employed for the expression of a protein in cell. For example, a nucleic acid molecule can be introduced into a cell by administering the nucleic acid in the presence of lipofection (Feigner et al., Proc. Nat'l. Acad. Sci. U.S.A. 84:7413, 1987; Ono et al., Neuroscience Letters 17:259, 1990; Brigham et al., Am. J. Med. Sci. 298:278, 1989; Staubinger et al., Methods in Enzymology 101:512, 1983), asialoorosomucoid-polylysine conjugation (Wu et al., Journal of Biological Chemistry 263:14621, 1988; Wu et al., Journal of Biological Chemistry 264:16985, 1989), or by micro-injection under surgical conditions (Wolff et al., Science 247:1465, 1990). Other non-viral means for gene transfer include transfection in vitro using calcium phosphate, DEAE dextran, electroporation, and protoplast fusion. Liposomes can also be potentially beneficial for delivery of DNA into a cell. Transplantation of normal genes into the affected tissues of a subject can also be accomplished by transferring a normal nucleic acid into a cultivatable cell type ex vivo (e.g., an autologous or heterologous primary cell or progeny thereof), after which the cell (or its descendants) are injected into a targeted tissue or are injected systemically. Recombinant receptors can also be derived or obtained using transposases or targeted nucleases (e.g. Zinc finger nucleases, meganucleases, or TALE nucleases). Transient expression may be obtained by RNA electroporation.

[0383] cDNA expression for use in polynucleotide therapy methods can be directed from any suitable promoter (e.g., the human cytomegalovirus (CMV), simian virus 40 (SV40), or metallothionein promoters), and regulated by any appropriate mammalian regulatory element or intron (e.g. the elongation factor 1 a enhancer/promoter/intron structure). For example, if desired, enhancers known to preferentially direct gene expression in specific cell types can be used to direct the expression of a nucleic acid. The enhancers used can include, without limitation, those that are characterized as tissue—or cell-specific enhancers. Alternatively, if a genomic clone is used as a therapeutic construct, regulation can be mediated by the cognate regulatory sequences or, if desired, by regulatory sequences derived from a heterologous source, including any of the promoters or regulatory elements described above.

[0384] The resulting cells can be grown under conditions similar to those for unmodified cells, whereby the modified cells can be expanded and used for a variety of purposes.

### V. Polypeptides and Analogs and Polynucleotides

[0385] Also included in the presently disclosed subject matter are extracellular antigen-binding domains that specifically binds to FcRL5 (e.g., human FcRL5) (e.g., an scFv, such as an scFv derived from antibodies F56 and F119, a Fab, or a (Fab)₂), CD3ζ, CD8, CD28, etc. polypeptides or fragments thereof, and polynucleotides encoding thereof that are modified in ways that enhance their anti-tumor activity when expressed in an immunoresponsive cell. In certain embodiments, the presently disclosed subject matter further provides extracellular antigen-binding domains that specifically binds to domain 9 FcRL5 (e.g., domain 7, domain 8 or domain 9 of human FcRL5) (e.g., an scFv, a Fab, or a (Fab)₂), CD3ζ, CD8, CD28, etc. polypeptides or fragments thereof, and polynucleotides encoding thereof that are modified in ways that enhance their anti-tumor activity when expressed in an immunoresponsive cell.

[0386] The presently disclosed subject matter provides methods for optimizing an amino acid sequence or a nucleic acid sequence by producing an alteration in the sequence. Such alterations may comprise certain mutations, deletions, insertions, or post-translational modifications. The presently disclosed subject matter further comprises analogs of any naturally-occurring polypeptide of the presently disclosed subject matter. Analogs can differ from a naturally-occurring polypeptide of the presently disclosed subject matter by amino acid sequence differences, by post-translational modifications, or by both. Analogs of the presently disclosed subject matter can generally exhibit at least about 85%, about 90%, about 91%, about 92%, about 93%, about 94%, about 95%, about 96%, about 97%, about 98%, about 99% or more identity with all or part of a naturally-occurring amino, acid sequence of the presently disclosed subject matter. The length of sequence comparison is at least 5, 10, 15, 20, 25, 50, 75, 100 or more amino acid residues. Again, in an exemplary approach to determining the degree of identity, a BLAST program may be used, with a probability score between e⁻³ and e⁻¹⁰⁰ indicating a closely related sequence. Modifications comprise in vivo and in vitro chemical derivatization of polypeptides, e.g., acetylation, carboxylation, phosphorylation, or glycosylation; such modifications may occur during polypeptide synthesis or processing or following treatment with isolated modifying enzymes. Analogs can also differ from the naturally-occurring polypeptides of the presently disclosed subject matter by alterations in primary sequence. These include genetic variants, both natural and induced (for example, resulting from random mutagenesis by irradiation or exposure to ethanemethylsulfate or by site-specific mutagenesis as described in Sambrook, Fritsch and Maniatis, Molecular Cloning: A Laboratory Manual (2d ed.), CSH Press, 1989, or Ausubel et al., supra). Also included are cyclized peptides, molecules, and analogs which contain residues other than L-amina acids, e.g., D-amino acids or non-naturally occurring or synthetic amino acids, e.g., beta (β) or gamma (γ) amino acids.

[0387] In addition to full-length polypeptides, the presently disclosed subject matter also provides fragments of any one of the polypeptides or peptide domains of the presently disclosed subject matter. A fragment can be at least 5, 10, 13, or 15 amino acids. In certain embodiments, a fragment is at least 20 contiguous amino acids, at least 30 contiguous amino acids, or at least 50 contiguous amino acids. In certain embodiments, a fragment is at least 60 to 80, 100, 200, 300 or more contiguous amino acids. Fragments of the presently disclosed subject matter can be generated by methods known to those of ordinary skill in the art or may result from normal protein processing (e.g., removal of amino acids from the nascent polypeptide that are not required for biological activity or removal of amino acids by alternative mRNA splicing or alternative protein processing events).

[0388] Non-protein analogs have a chemical structure designed to mimic the functional activity of a protein of the invention. Such analogs are administered according to methods of the presently disclosed subject matter. Such analogs may exceed the physiological activity of the original polypeptide. Methods of analog design are well known in the art, and synthesis of analogs can be carried out according to such methods by modifying the chemical structures such that the resultant analogs increase the anti-neoplastic activity of the original polypeptide when expressed in an immunoresponsive cell. These chemical modifications include, but are not limited to, substituting alternative R groups and varying the degree of saturation at specific carbon atoms of a reference polypeptide. The protein analogs can be relatively resistant to in vivo degradation, resulting in a more prolonged therapeutic effect upon administration. Assays for measuring functional activity include, but are not limited to, those described in the Examples below.

[0389] In accordance with the presently disclosed subject matter, the polynucleotides encoding an extracellular antigen-binding domain that specifically binds to FcRL5 (e.g., an scFV (e.g., an scFv derived from antibodies F56 and F 119), a Fab, Fab′ or a (Fab′)₂), CD3ζ, CD8, CD28) can be modified by codon optimization. Codon optimization can alter both naturally occurring and recombinant gene sequences to achieve the highest possible levels of productivity in any given expression system. Factors that are involved in different stages of protein expression include codon adaptability, mRNA structure, and various cis-elements in transcription and translation. Any suitable codon optimization methods or technologies that are known to ones skilled in the art can be used to modify the polynucleotids of the presently disclosed subject matter, including, but not limited to, OPTIMUMGENE™, Encor optimization, and Blue Heron.

### VI. Administration

[0390] FcRL5-specific CARs and immunoresponsive cells expressing thereof of the presently disclosed subject matter can be provided systemically or directly to a subject for treating or preventing a neoplasia. In certain embodiments, the FcRL5-specific CARs and immunoresponsive cells expressing thereof are directly injected into an organ of interest (e.g., an organ affected by a neoplasia). Alternatively or additionally, the FcRL5-specific CARs and immunoresponsive cells expressing thereof are provided indirectly to the organ of interest, for example, by administration into the circulatory system (e.g., the tumor vasculature). Expansion and differentiation agents can be provided prior to, during or after administration of cells and compositions to increase production of T cells in vitro or in vivo.

[0391] FcRL5-specific CARs and immunoresponsive cells expressing thereof of the presently disclosed subject matter can be administered in any physiologically acceptable vehicle, normally intravascularly, although they may also be introduced into bone or other convenient site where the cells may find an appropriate site for regeneration and differentiation (e.g., thymus). Usually, at least 1×10⁵ cells can be administered, eventually reaching 1×10¹⁰ or more. A cell population comprising immunoresponsive cells expressing a FcRL5-specific CAR can comprise a purified population of cells. Those skilled in the art can readily determine the percentage of immunoresponsive cells in a cell population using various well-known methods, such as fluorescence activated cell sorting (FACS). The ranges of purity in cell populations comprising genetically modified immunoresponsive cells expressing a FcRL5-specific CAR can be from about 50% to about 55%, from about 55% to about 60%, from about 65% to about 70%, from about 70% to about 75%, from about 75% to about 80%, from about 80% to about 85%; from about 85% to about 90%, from about 90% to about 95%, or from about 95 to about 100%. Dosages can be readily adjusted by those skilled in the art (e.g., a decrease in purity may require an increase in dosage). The immunoresponsive cells can be introduced by injection, catheter, or the like. If desired, factors can also be included, including, but not limited to, interleukins, e.g. IL-2, IL-3, IL 6, IL-11, IL-7, IL-12, IL-15, IL-21, as well as the other interleukins, the colony stimulating factors, such as G-, M- and GM-CSF, interferons, e.g., γ-interferon.

[0392] Compositions of the presently disclosed subject matter comprise pharmaceutical compositions comprising immunoresponsive cells expressing a FcRL5-specific CAR and a pharmaceutically acceptable carrier. Administration can be autologous or non-autologous. For example, immunoresponsive cells expressing a FcRL5-specific CAR and compositions comprising thereof can be obtained from one subject, and administered to the same subject or a different, compatible subject. Peripheral blood derived T cells of the presently disclosed subject matter or their progeny (e.g., in vivo, ex vivo or in vitro derived) can be administered via localized injection, including catheter administration, systemic injection, localized injection, intravenous injection, or parenteral administration. When administering a pharmaceutical composition of the presently disclosed subject matter (e.g., a pharmaceutical composition comprising immunoresponsive cells expressing a FcRL5-specific CAR), it can be formulated in a unit dosage injectable form (solution, suspension, emulsion).

### VII. Formulations

[0393] Immunoresponsive cells expressing a generally FcRL5-specific CAR and compositions comprising thereof of the presently disclosed subject matter can be conveniently provided as sterile liquid preparations, e.g., isotonic aqueous solutions, suspensions, emulsions, dispersions, or viscous compositions, which may be buffered to a selected pH. Liquid preparations are normally easier to prepare than gels, other viscous compositions, and solid compositions. Additionally, liquid compositions are somewhat more convenient to administer, especially by injection. Viscous compositions, on the other hand, can be formulated within the appropriate viscosity range to provide longer contact periods with specific tissues. Liquid or viscous compositions can comprise carriers, which can be a solvent or dispersing medium containing, for example, water, saline, phosphate buffered saline, polyol (for example, glycerol, propylene glycol, liquid polyethylene glycol, and the like) and suitable mixtures thereof.

[0394] Sterile injectable solutions can be prepared by incorporating the compositions comprising immunoresponsive cells expressing a generally FcRL5-specific CAR of the presently disclosed subject matter in the required amount of the appropriate solvent with various amounts of the other ingredients, as desired. Such compositions may be in admixture with a suitable carrier, diluent, or excipient such as sterile water, physiological saline, glucose, dextrose, or the like. The compositions can also be lyophilized. The compositions can contain auxiliary substances such as wetting, dispersing, or emulsifying agents (e.g., methylcellulose), pH buffering agents, gelling or viscosity enhancing additives, preservatives, flavoring agents, colors, and the like, depending upon the route of administration and the preparation desired. Standard texts, such as “REMINGTON'S PHARMACEUTICAL SCIENCE,” 17th edition, 1985, incorporated herein by reference, may be consulted to prepare suitable preparations, without undue experimentation.

[0395] Various additives which enhance the stability and sterility of the compositions, including antimicrobial preservatives, antioxidants, chelating agents, and buffers, can be added. Prevention of the action of microorganisms can be ensured by various antibacterial and antifungal agents, for example, parabens, chlorobutanol, phenol, sorbic acid, and the like. Prolonged absorption of the injectable pharmaceutical form can be brought about by the use of agents delaying absorption, for example, alum inurn monostearate and gelatin. According to the present invention, however, any vehicle, diluent, or additive used would have to be compatible with the immunoresponsive cells expressing a generally FcRL5-specific CAR of the presently disclosed subject matter.

[0396] The compositions can be isotonic, i.e., they can have the same osmotic pressure as blood and lacrimal fluid. The desired isotonicity of the compositions of the presently disclosed subject matter may be accomplished using sodium chloride, or other pharmaceutically acceptable agents such as dextrose, boric acid, sodium tartrate, propylene glycol or other inorganic or organic solutes. Sodium chloride is preferred particularly for buffers containing sodium ions.

[0397] Viscosity of the compositions, if desired, can be maintained at the selected level using a pharmaceutically acceptable thickening agent. Methylcellulose can be used because it is readily and economically available and is easy to work with. Other suitable thickening agents include, for example, xanthan gum, carboxymethyl cellulose, hydroxypropyl cellulose, carbomer, and the like. The concentration of the thickener can depend upon the agent selected. The important point is to use an amount that will achieve the selected viscosity. Obviously, the choice of suitable carriers and other additives will depend on the exact route of administration and the nature of the particular dosage form, e.g., liquid dosage form (e.g., whether the composition is to be formulated into a solution, a suspension, gel or another liquid form, such as a time release form or liquid-filled form).

[0398] Those skilled in the art will recognize that the components of the compositions should be selected to be chemically inert and will not affect the viability or efficacy of the immunoresponsive cells as describe in the presently disclosed subject matter. This will present no problem to those skilled in chemical and pharmaceutical principles, or problems can be readily avoided by reference to standard texts or by simple experiments (not involving undue experimentation), from this disclosure and the documents cited herein.

[0399] One consideration concerning the therapeutic use of the immunoresponsive cells of the presently disclosed subject matter is the quantity of cells necessary to achieve an optimal effect. The quantity of cells to be administered will vary for the subject being treated. In certain embodiments, from about 10⁴ to about 10¹⁰, from about 10⁵ to about 10⁹, or from about 10⁶ to about 10⁸ immunoresponsive cells of the presently disclosed subject matter are administered to a subject. More effective cells may be administered in even smaller numbers. In certain embodiments, at least about 1×10⁸, about 2×10⁸, about 3×10⁸, about 4×10⁸, and about 5×10⁸ immunoresponsive cells of the presently disclosed subject matter are administered to a human subject. The precise determination of what would be considered an effective dose may be based on factors individual to each subject, including their size, age, sex, weight, and condition of the particular subject. Dosages can be readily ascertained by those skilled in the art from this disclosure and the knowledge in the art.

[0400] The skilled artisan can readily determine the amount of cells and optional additives, vehicles, and/or carrier in compositions and to be administered in methods of the presently disclosed subject matter. Typically, any additives (in addition to the active cell(s) and/or agent(s)) are present in an amount of from about 0.001% to about 50% by weight) solution in phosphate buffered saline, and the active ingredient is present in the order of micrograms to milligrams, such as from about 0.0001 wt % to about 5 wt %, from about 0.0001 wt % to about 1 wt %, from about 0.0001 wt % to about 0.05 wt %, from about 0.001 wt % to about 20 wt %, from about 0.01 wt % to about 10 wt %, or from about 0.05 wt % to about 5 wt %. For any composition to be administered to an animal or human, and for any particular method of administration, toxicity should be determined, such as by determining the lethal dose (LD) and LD50 in a suitable animal model e.g., rodent such as mouse; and, the dosage of the composition(s), concentration of components therein and timing of administering the composition(s), which elicit a suitable response. Such determinations do not require undue experimentation from the knowledge of the skilled artisan, this disclosure and the documents cited herein. And, the time for sequential administrations can be ascertained without undue experimentation.

### VIII. Methods of Treatment

[0401] Tumor Microenvironment. Tumors have a microenvironment that is hostile to the host immune response involving a series of mechanisms by malignant cells to protect themselves from immune recognition and elimination. This “hostile tumor microenvironment” comprises a variety of immune suppressive factors including infiltrating regulatory CD4⁺ T cells (Tregs), myeloid derived suppressor cells (MDSCs), tumor associated macrophages (TAMs), immune suppressive cytokines including IL-10 and TGF-β, and expression of ligands targeted to immune suppressive receptors expressed by activated T cells (CTLA-4 and PD-1). These mechanisms of immune suppression play a role in the maintenance of tolerance and suppressing inappropriate immune responses, however within the tumor microenvironment these mechanisms prevent an effective anti-tumor immune response. Collectively these immune suppressive factors can induce either marked anergy or apoptosis of adoptively transferred CAR modified T cells upon encounter with targeted tumor cells.

[0402] Challenges in tumor immunology. Effective tumor immunity requires recognition of tumor antigens and unopposed tumor elimination by immune effector cells. Tumor antigens must contain peptide epitopes that are presented by the tumor and can be recognized by specific cytotoxic T lymphocytes (CTLs). The primed CTLs must expand to a sufficient number and migrate to tumor sites, wherein they mature into effectors to perform their functions, which are enhanced by helper T cells and dampened by Tregs and inhibitory macrophages.

[0403] Targeted T cell therapy with engineered T lymphocytes. T cell engineering is a groundbreaking strategy to potentially resolve many previously observed shortcomings of earlier immunotherapeutic approaches. Within the past year, researchers have reported dramatic complete remissions in relapsed (Brentjens et al., Blood 118, 4817-4828 (2011) and Brentjens et al., Science translational medicine 5, 177ra138 (2013)), chemorefractory leukemia and metastatic melanoma (Hunder et al., N. Engl.J.Med. 358, 2698-2703 (2008); Rosenberg et al., Nat. Rev. Cancer 8, 299-308 (2008); and Dudley et al., J Clin Oncol 26, 5233-5239 (2008)), obtained with autologous peripheral blood T cells targeted to a defined antigen (CD19 and NY-ESO-1, respectively).

[0404] Rationale for a genetic approach: Cell engineering can be used to redirect T cells toward tumor antigens and to enhance T cell function. One impetus for genetic T cell modification is the potential to enhance T cell survival and expansion and to offset T cell death, anergy, and immune suppression. The genetic targeting of T cells can also be refined to prevent undesired destruction of normal tissues.

[0405] Chimeric antigen receptors (CARs): Tumor-specific T cells can be generated by the transfer of genes that encode CARs (Brentjens et al., Clin.Cancer Res. 13, 5426-5435 (2007); Gade et al., Cancer Res. 65, 9080-9088 (2005); Maher et al., Nat.Biotechnol. 20, 70-75 (2002); Kershaw et al., J Immunol 173, 2143-2150 (2004); Sadelain et al., Curr Opin Immunol (2009); and Hollyman et al., J Immunother 32, 169-180 (2009)). Second-generation CARs comprise a tumor antigen-binding domain fused to an intracellular signaling domain capable of activating T cells and a co-stimulatory domain designed to augment T cell potency and persistence (Sadelain et al., Cancer discovery 3, 388-398 (2013)). CAR design can therefore reconcile antigen recognition with signal transduction, two functions that are physiologically borne by two separate complexes, the TCR heterodimer and the CD3 complex. The CAR's extracellular antigen-binding domain is usually derived from a murine monoclonal antibody (mAb) or from receptors or their ligands. Antigen recognition is therefore not MHC-restricted (Riviere et al., Curr Hematol Rep 3, 290-297 (2004); and Stephan et al., Nat. Med. 13, 1440-1449 (2007)) and is therefore applicable to any patient expressing the target antigen, using the same CAR. Antigen binding by the CARs triggers phosphorylation of immunoreceptor tyrosine-based activation motifs (ITAMs) in the intracellular domain, initiating a signaling cascade required for cytolysis induction, cytokine secretion, and proliferation. Because MHC restriction of antigen recognition is bypassed, the function of CAR-targeted T cells is not affected by HLA downregulation or defects in the antigen-processing machinery.

[0406] T cell requirements for expansion and survival: Proliferation of tumor-specific T cells is needed ex vivo and is arguably desirable in vivo. T cell proliferation must be accompanied by T cell survival to permit absolute T cell expansion and persistence. To proliferate in response to antigen, T cells must receive two signals. One is provided by TCR recognition of antigenic peptide/MHC complexes displayed on the surface of antigen-presenting cells (APCs) (Sadelain et al., Curr Opin Immunol (2009)). The other is provided by a T cell co-stimulatory receptor, such as the CD28 or 4-1BB receptors. Whereas the cytolytic activity of T cells does not require concomitant co-stimulation, there is a critical need for the provision of co-stimulatory signals to sustain the antitumor functions of adoptively transferred T cells, as previously demonstrated (Maher et al., Nat.Biotechnol. 20, 70-75 (2002); Sadelain et al., Cancer discovery 3, 388-398 (2013); Krause et al., J Exp Med 188, 619-626 (1998);Gong et al., Neoplasia. 1, 123-127 (1999); and Lyddane et al., J.Immunol. 176, 3306-3310 (2006)).

[0407] Immune monitoring: Lymphocytes are multifunctional “drugs” that exhibit dynamically evolving effects after infusion. Upon antigen encounter, tumor-specific T cells activate and/or release a variety of proteins that can trigger tumor killing, T cell proliferation, and recruitment or immunomodulation of other immune cells. Thus, measuring which proteins are secreted from which cells, in what quantity, and at what time point yields profound insights into why a particular patient is or is not responding and provides critical feedback for designing more-effective trials. These assay systems will permit direct and meaningful comparisons of clinical approaches and thus help design rational, next-generation therapeutic strategies.

[0408] For treatment, the amount administered is an amount effective in producing the desired effect. An effective amount can be provided in one or a series of administrations. An effective amount can be provided in a bolus or by continuous perfusion.

[0409] An “effective amount” (or, “therapeutically effective amount”) is an amount sufficient to affect a beneficial or desired clinical result upon treatment. An effective amount can be administered to a subject in one or more doses. In terms of treatment, an effective amount is an amount that is sufficient to palliate, ameliorate, stabilize, reverse or slow the progression of the disease, or otherwise reduce the pathological consequences of the disease. The effective amount is generally determined by the physician on a case-by-case basis and is within the skill of one in the art. Several factors are typically taken into account when determining an appropriate dosage to achieve an effective amount. These factors include age, sex and weight of the subject, the condition being treated, the severity of the condition and the form and effective concentration of the immunoresponsive cells administered.

[0410] For adoptive immunotherapy using antigen-specific T cells, cell doses in the range of about 10⁶ to about 10¹⁰ (e.g., about 10⁹) are typically infused. Upon administration of the immunoresponsive cells into the subject and subsequent differentiation, the immunoresponsive cells are induced that are specifically directed against one specific antigen (e.g., FcRL5). “Induction” of T cells can include inactivation of antigen-specific T cells such as by deletion or anergy. Inactivation is particularly useful to establish or reestablish tolerance such as in autoimmune disorders. The immunoresponsive cells of the presently disclosed subject matter can be administered by any methods known in the art, including, but not limited to, pleural administration, intravenous administration, subcutaneous administration, intranodal administration, intratumoral administration, intrathecal administration, intrapleural administration, intraperitoneal administration, and direct administration to the thymus. In certain embodiments, the immunoresponsive cells and the compositions comprising thereof are intravenously administered to the subject in need.

[0411] The presently disclosed subject matter provides various methods of using the immunoresponsive cells (e.g., T cells) expressing a FcRL5-specific CAR. For example, the presently disclosed subject matter provides methods of reducing tumor burden in a subject. In one non-limiting example, the method of reducing tumor burden comprises administering an effective amount of the presently disclosed immunoresponsive cell to the subject, thereby inducing tumor cell death in the subject. The presently disclosed immunoresponsive cell can reduce the number of tumor cells, reduce tumor size, and/or eradicate the tumor in the subject. Non-limiting examples of suitable tumors include multiple myeloma, Non-Hodgkin Lymphoma (especially Mantle Cell), Hodgkin Lymphoma, Chronic Lymphocytic Leukemia (CLL), Acute lymphocytic leukemia (ALL), Hairy Cell Leukemia, Burketts Lymphoma, and Waldenstrom's Macroglobulinemia.

[0412] The presently disclosed subject matter also provides methods of increasing or lengthening survival of a subject having a neoplasia. In one non-limiting example, the method of increasing or lengthening survival of a subject having neoplasia comprises administering an effective amount of the presently disclosed immunoresponsive cell to the subject, thereby increasing or lengthening survival of the subject. The method can reduce or eradicate tumor burden in the subject. The presently disclosed subject matter further provides methods for treating or preventing a neoplasia in a subject, comprising administering the presently disclosed immunoresponsive cell to the subject.

[0413] As used herein, the term “neoplasia” refers to a disease characterized by the pathological proliferation of a cell or tissue and its subsequent migration to or invasion of other tissues or organs. Neoplasia growth is typically uncontrolled and progressive, and occurs under conditions that would not elicit, or would cause cessation of, multiplication of normal cells. Neoplasias can affect a variety of cell types, tissues, or organs, including but not limited to an organ selected from the group consisting of bladder, colon, bone, brain, breast, cartilage, glia, esophagus, fallopian tube, gallbladder, heart, intestines, kidney, liver, lung, lymph node, nervous tissue, ovaries, pleura, pancreas, prostate, skeletal muscle, skin, spinal cord, spleen, stomach, testes, thymus, thyroid, trachea, urogenital tract, ureter, urethra, uterus, and vagina, or a tissue or cell type thereof. Neoplasias include cancers, such as sarcomas, carcinomas, or plasmacytomas (malignant tumor of the plasma cells).

[0414] Cancers whose growth may be inhibited using the immunoresponsive cells of the presently disclosed subject matter comprise cancers typically responsive to immunotherapy. Non-limiting examples of cancers for treatment include multiple myeloma, Non-Hodgkin Lymphoma (especially Mantle Cell), Hodgkin Lymphoma, Chronic Lymphocytic Leukemia (CLL), Acute lymphocytic leukemia (ALL), Hairy Cell Leukemia, Burketts Lymphoma, and Waldenstrom's Macroglobulinemia. In certain embodiments, the cancer is multiple myeloma.

[0415] Additionally, the presently disclosed subject matter provides methods of increasing immune-activating cytokine production in response to a cancer cell in a subject. In one non-limiting example, the method comprises administering the presently disclosed immunoresponsive cell to the subject. The immune-activating cytokine can be granulocyte macrophage colony stimulating factor (GM-CSF), IFN-α, IFN-β, IFN-γ, TNF-α, IL-2, IL-3, IL-6, IL-11, IL-7, IL-12, IL-15, IL-21, interferon regulatory factor 7 (IRF7), and combinations thereof. In certain embodiments, the immunoresponsive cells including an FcRL5-specific CAR of the presently disclosed subject matter increase the production of GM-CSF, IFN-γ, and/or TNF-α.

[0416] Suitable human subjects for therapy typically comprise two treatment groups that can be distinguished by clinical criteria. Subjects with “advanced disease” or “high tumor burden” are those who bear a clinically measurable tumor (e.g., multiple myeloma). A clinically measurable tumor is one that can be detected on the basis of tumor mass (e.g., by palpation, CAT scan, sonogram, mammogram or X-ray; positive biochemical or histopathologic markers on their own are insufficient to identify this population). A pharmaceutical composition embodied in the presently disclosed subject matter is administered to these subjects to elicit an anti-tumor response, with the objective of palliating their condition. Ideally, reduction in tumor mass occurs as a result, but any clinical improvement constitutes a benefit. Clinical improvement comprises decreased risk or rate of progression or reduction in pathological consequences of the tumor (e.g., multiple myeloma).

[0417] A second group of suitable subjects is known in the art as the “adjuvant group.” These are individuals who have had a history of neoplasia (e.g., multiple myeloma), but have been responsive to another mode of therapy. The prior therapy can have included, but is not restricted to, surgical resection, radiotherapy, and traditional chemotherapy. As a result, these individuals have no clinically measurable tumor. However, they are suspected of being at risk for progression of the disease, either near the original tumor site, or by metastases. This group can be further subdivided into high-risk and low-risk individuals. The subdivision is made on the basis of features observed before or after the initial treatment. These features are known in the clinical arts, and are suitably defined for each different neoplasia. Features typical of high-risk subgroups are those in which the tumor (e.g., multiple myeloma) has invaded neighboring tissues, or who show involvement of lymph nodes. Another group has a genetic predisposition to neoplasia (e.g., multiple myeloma) but has not yet evidenced clinical signs of neoplasia (e.g., multiple myeloma). For instance, women testing positive for a genetic mutation associated with breast cancer, but still of childbearing age, can wish to receive one or more of the antigen-binding fragments described herein in treatment prophylactically to prevent the occurrence of neoplasia until it is suitable to perform preventive surgery.

[0418] The subjects can have an advanced form of disease (e.g., multiple myeloma), in which case the treatment objective can include mitigation or reversal of disease progression, and/or amelioration of side effects. The subjects can have a history of the condition, for which they have already been treated, in which case the therapeutic objective will typically include a decrease or delay in the risk of recurrence.

[0419] Further modification can be introduced to the FcRL5-specific CAR-expressing immunoresponsive cells (e.g., T cells) to avert or minimize the risks of immunological complications (known as “malignant T-cell transformation”), e.g., graft versus-host disease (GvHD), or when healthy tissues express the same target antigens as the tumor cells, leading to outcomes similar to GvHD. A potential solution to this problem is engineering a suicide gene into the CAR-expressing T cells. Suitable suicide genes include, but are not limited to, Herpes simplex virus thymidine kinase (hsv-tk), inducible Caspase 9 Suicide gene (iCasp-9), and a truncated human epidermal growth factor receptor (EGFRt) polypeptide. In certain embodiments, the suicide gene is an EGFRt polypeptide. The EGFRt polypeptide can enable T cell elimination by administering anti-EGFR monoclonal antibody (e.g., cetuximab). EGFRt can be covalently joined to the 3′ terminus of the intracellular domain of the FcRL5-specific CAR. The suicide gene can be included within the vector comprising nucleic acids encoding the presently disclosed FcRL5-specific CARs. In this way, administration of a prodrug designed to activate the suicide gene (e.g., a prodrug (e.g., AP1903 that can activates iCasp-9) during malignant T-cell transformation (e.g., GVHD) triggers apoptosis in the suicide gene-activated CAR-expressing T cells.

### IX. Kits

[0420] The presently disclosed subject matter provides kits for the treatment or prevention of a neoplasia (e.g., multiple myeloma). In certain embodiments, the kit comprises a therapeutic or prophylactic composition containing an effective amount of an immunoresponsive cell comprising a FcRL5-specific CAR in unit dosage form. In particular embodiments, the cells further expresses at least one co-stimulatory ligand. In certain embodiments, the kit comprises a sterile container which contains a therapeutic or prophylactic vaccine; such containers can be boxes, ampules, bottles, vials, tubes, bags, pouches, blister-packs, or other suitable container forms known in the art. Such containers can be made of plastic, glass, laminated paper, metal foil, or other materials suitable for holding medicaments.

[0421] If desired, the immunoresponsive cell is provided together with instructions for administering the cell to a subject having or at risk of developing a neoplasia (e.g., multiple myeloma). The instructions will generally include information about the use of the composition for the treatment or prevention of a neoplasia (e.g., multiple myeloma). In other embodiments, the instructions include at least one of the following: description of the therapeutic agent; dosage schedule and administration for treatment or prevention of a neoplasia (e.g., multiple myeloma) or symptoms thereof; precautions; warnings; indications; counter-indications; overdosage information; adverse reactions; animal pharmacology; clinical studies; and/or references. The instructions may be printed directly on the container (when present), or as a label applied to the container, or as a separate sheet, pamphlet, card, or folder supplied in or with the container.

### X. Exemplary extracellular antigen-binding domains (e.g., scFvs)

TABLE 1
ET200-001

DNA Sequence
(light chain variable region scFv linker heavy chain variable region His tag + HA tag)
Cagtctgtgttgacgcagccaccctcagcgtctgggacccccgggcagagggtcaccatctcttgttctggaagcagctccaacatcggaagta
atactgtaaactggtaccagcagctcccaggaacggcccccaaactcctcatctatagtaataatcagcggccctcaggggtccctgaccgattct
ctggctccaagtctggcacctcagcctccctggccatcagtgggctccagtctgaggatgaggctgattattactgtgcagcatgggatgacagc
ctgaatggttatgtcttcggaactgggaccaaggtcaccgtcctaggt [SEQ ID NO: 1]
tctagaggtggtggtggtagcggcggcggcggctctggtggtggtggatccctcgagatggcc [SEQ ID NO: 305]
caggtgcagctacagcagtggggcgcaggactgttgaagccttcggagaccctgtccctcacctgcgctgtgtatggtgggtccttcagt
ggttactactggagctggatccgccagcccccagggaaggggctggagtggattggggaaatcaatcatagtggaagcaccaactaca
acccgtccctcaagagtcgagtcaccatatcagtagacacgtccaagaaccagttctccctgaagctgagctctgtgaccgccgcggac
acggccgtgtattactgtgcgcgcgaaggtccgtacgacggtttcgattcttggggtcaaggtactctggtgaccgtctcctca [SEQ
ID NO: 2]
ACTAGTGGCCAGGCCGGCCAGCACCATCACCATCACCATGGCGCATACCCGTACGACGT
TCCGGACTACGCTTCT [SEQ ID NO: 306]
Amino Acid Sequence
(light chain variable region scFv linker heavy chain variable region His tag + HA tag)
QSVLTQPPSASGTPGQRVTISCSGSSSNIGSNTVNWYQQLPGTAPKLLIYSNNQRPSGVPDRF
SGSKSGTSASLAISGLQSEDEADYYCAAWDDSLNGYVFGTGTKVTVLG [SEQ ID NO: 3]
SRGGGGSGGGGSGGGGSLEMA [SEQ ID NO: 307]
QVQLQQWGAGLLKPSETLSLTCAVYGGSFSGYYWSWIRQPPGKGLEWIGEINHSGST
NYNPSLKSRVTISVDTSKNQFSLKLSSVTAADTAVYYCAREGPYDGFDSWGQGTLVTV
SS [SEQ ID NO: 4]
TSGQAGQHHHHHHGAYPYDVPDYAS [SEQ ID NO: 308]

TABLE 2
ET200-002

DNA Sequence
(light chain variable region scFv linker heavy chain variable region His tag + HA tag)
Aattttatgctgactcagccccactctgtgtcggagtctccggggaagacggtaaccatctcctgcacccgcagcagtggcagc
attgccagcaactatgtgcagtggtaccagcagcgcccgggcagtgcccccaccactgtgatctatgaggataaccaaagacc
ctctggggtccctgatcggttctctggctccatcgacagctcctccaactctgcctccctcaccatctctggactgaagactgagg
acgaggctgactactactgtcagtcttatgatagcagcaattctgtggtattcggcggagggaccaagctgaccgtcctaggt
[SEQ ID No. 5]
tctagaggtggtggtggtagcggcggcggcggctctggtggtggtggatccctcgagatggcc [SEQ ID NO: 305]
caggtccagctggtacagtctggcactgaggtgaagaagcctggggcctcagtgagggtcgcctgcaaggcttctggtt
acccctttaacaaatatgacatcaactgggtgcgacaggcccctggacaagggcttgagtggatgggaggcatcatccc
tatctttcgtacaacaaactacgcacagaagttccagggcagagtcacgattaccgcggacgaatccacgagcacagcc
tacatggagctgagcagcctgagatctgaggacacggccgtatattactgtgcgcgcgaatggttctactgggatatctg
gggtcaaggtactctggtgaccgtctcctca [SEQ ID NO: 6]
ACTAGTGGCCAGGCCGGCCAGCACCATCACCATCACCATGGCGCATACCCGT
ACGACGTTCCGGACTACGCTTCT [SEQ ID NO: 306]
Amino Acid Sequence
(light chain variable region scFv linker heavy chain variable region His tag + HA tag)
NFMLTQPHSVSESPGKTVTISCTRSSGSIASNYVQWYQQRPGSAPTTVIYEDNQRP
SGVPDRFSGSIDSSSNSASLTISGLKTEDEADYYCQSYDSSNSVVFGGGTKLTVLG
[SEQ ID NO: 7]
SRGGGGSGGGGSGGGGSLEMA [SEQ ID NO: 307]
QVQLVQSGTEVKKPGASVRVACKASGYPFNKYDINWVRQAPGQGLEWMG
GIIPIFRTTNYAQKFQGRVTITADESTSTAYMELSSLRSEDTAVYYCAREWFY
WDIWGQGTLVTVSS [SEQ ID NO: 8]
TSGQAGQHHHHHHGAYPYDVPDYAS [SEQ ID NO: 308]

TABLE 3
ET200-003

DNA Sequence
(light chain variable region scFv linker heavy chain variable region His tag + HA tag)
cagtctgtgttgactcagccaccctcagtgtccgtgtccccaggacagacagccagcatctcctgctctggaaataaattgggga
ctaagtatgtttactggtatcagaagaggccaggccagtcccctgtgttggtcatgtatgaagataatcagcggccctcagggatc
ccggagcggttctctggctccaactctgggaacacagccactctgaccatcagagggacccagactgtggatgaggctgactat
tactgtcaggcgtgggactccgacactttcgtggtcttcggcggagggaccaaggtcaccgtcctaggt [SEQ ID NO: 9]
tctagaggtggtggtggtagcggcggcggcggctctggtggtggtggatccctcgagatggcc [SEQ ID NO: 305]
gaggtgcagctggtggagaccgggggaggcgtggtccagcctgggaggtccctgagactctcctgtgcagcctctggat
tcaccttcagtagttatggcatgcactgggtccgccaggctccaggcaaggggctggagtgggtggcagttatatcacat
gatggaagtaataaatactacgcagactccgtgaagggccgattcaccatctccagagacaattccaaggacacgctgt
atctgcaaatgaacagcctgagaggtgaggacacggccgtatattactgtgcgcgctctaaccagtggtctggttacttct
ctttcgattactggggtcaaggtactctggtgaccgtctcctca [SEQ ID NO: 10]
ACTAGTGGCCAGGCCGGCCAGCACCATCACCATCACCATGGCGCATACCCGT
ACGACGTTCCGGACTACGCTTCT [SEQ ID NO: 306]
Amino Acid Sequence
(light chain variable region scFv linker heavy chain variable region His tag + HA tag)
QSVLTQPPSVSVSPGQTASISCSGNKLGTKYVYWYQKRPGQSPVLVMYEDNQRP
SGIPERFSGSNSGNTATLTIRGTQTVDEADYYCQAWDSDTFVVFGGGTKVTVLG
[SEQ ID NO: 11]
SRGGGGSGGGGSGGGGSLEMA [SEQ ID NO: 307]
EVQLVETGGGVVQPGRSLRLSCAASGFTFSSYGMHWVRQAPGKGLEWVAV
ISHDGSNKYYADSVKGRFTISRDNSKDTLYLQMNSLRGEDTAVYYCARSNQ
WSGYFSFDYWGQGTLVTVSS [SEQ ID NO: 12]
TSGQAGQHHHHHHGAYPYDVPDYAS [SEQ ID NO: 308]

TABLE 4
ET200-006

DNA Sequence
(light chain variable region scFv linker heavy chain variable region His tag + HA tag)
tcctatgtgctgactcagccaccctcagtgtcagtggccccaggaaagacggccaggattacctgtgggggaaacaacattgga
agtaaaagtgtgcactggtaccagcagaagccaggccaggcccctgtggtggtcatccattatgatagcgaccggccctcagg
gatccctgagcgattctctggctccaactctgggaacacggccaccctgaccatcagcagggtcgaagccggggatgaggcc
gactattactgtcaggtgtgggatagtagtagtgatcatccttatgtcttcggaactgggaccaaggtcaccgtcctaggt [SEQ
ID NO: 13]
tctagaggtggtggtggtagcggcggcggcggctctggtggtggtggatccctcgagatggcc [SEQ ID NO: 305]
gaggtgcagctggtgcagtctggagctgaggtgaagaagcctggggcctcagtgaaggtctcctgcaaggcttctggtt
acacctttaccacctatggtatcagctgggtgcgacaggcccctggacaagggcttgagtggatgggatggatcaacac
ttacaatggtcacacaaactatgcacagaagctccagggcagagccacaatgaccgcagacacatccacgaacacag
cctacatggagctgaggagcctgagatctgacgacactgccgtgtattactgtgcgcgcgttatctacggttctggtgatt
actggggtcaaggtactctggtgaccgtctcctca [SEQ ID NO: 14]
ACTAGTGGCCAGGCCGGCCAGCACCATCACCATCACCATGGCGCATACCCGT
ACGACGTTCCGGACTACGCTTCT [SEQ ID NO: 306]
Amino Acid Sequence
(light chain variable region scFv linker heavy chain variable region His tag + HA tag)
SYVLTQPPSVSVAPGKTARITCGGNNIGSKSVHWYQQKPGQAPVVVIHYDSDRP
SGIPERFSGSNSGNTATLTISRVEAGDEADYYCQVWDSSSDHPYVFGTGTKVTVLG
[SEQ ID NO: 15]
SRGGGGSGGGGSGGGGSLEMA [SEQ ID NO: 307]
EVQLVQSGAEVKKPGASVKVSCKASGYTFTTYGISWVRQAPGQGLEWMG
WINTYNGHTNYAQKLQGRATMTADTSTNTAYMELRSLRSDDTAVYYCARV
IYGSGDYWGQGTLVTVSS [SEQ ID NO: 16]
TSGQAGQHHHHHHGAYPYDVPDYAS [SEQ ID NO: 308]

TABLE 5
ET200-007

DNA Sequence
(light chain variable region scFv linker heavy chain variable region His tag + HA tag)
tcctatgtgctgactcagccactctcagtgtcagtggccccaggaaagacggccaggattacctgtgggggaaacaacattgga
agtaaaactgtgcactggtaccagcagaagccaggccaggcccctgtgctggtcatctattatgatagcgaccggccctcaggg
atccctgagcgattctctggctccaactctgggaacacggccaccctgaccatcagcagggtcgaagccggggatgaggccg
actattactgtcaggtgtgggatagtagtagtgatcatcgggtgttcggcggagggaccaagctgaccgtcctaggt [SEQ
ID NO: 17]
tctagaggtggtggtggtagcggcggcggcggctctggtggtggtggatccctcgagatggcc [SEQ ID NO: 305]
caggtgcagctgcaggagtcgggcccaggactggtgaagccttcggagaccctgtccctcacctgcaatgtctctggtta
ctccatcagcagtggttacttttggggctggatccggcagcccccagggaaggggctggagtggattgggagtatctatc
atagtaggagcacctactacaacccgtccctcaagagtcgagtcaccatatcagtagacacgtccaagaaccagttctc
cctgaagctgaactctgtgaccgccgcagacacggccgtgtattactgtgcgcgcggttacggttacttcgattactgggg
tcaaggtactctggtgaccgtctcctca [SEQ ID NO: 18]
ACTAGTGGCCAGGCCGGCCAGCACCATCACCATCACCATGGCGCATACCCGT
ACGACGTTCCGGACTACGCTTCT [SEQ ID NO: 306]
Amino Acid Sequence
(light chain variable region scFv linker heavy chain variable region His tag + HA tag)
SYVLTQPLSVSVAPGKTARITCGGNNIGSKTVHWYQQKPGQAPVLVIYYDSDRP
SGIPERFSGSNSGNTATLTISRVEAGDEADYYCQVWDSSSDHRVFGGGTKLTVLG
[SEQ ID NO: 19]
SRGGGGSGGGGSGGGGSLEMA [SEQ ID NO: 307]
QVQLQESGPGLVKPSETLSLTCNVSGYSISSGYFWGWIRQPPGKGLEWIGSI
YHSRSTYYNPSLKSRVTISVDTSKNQFSLKLNSVTAADTAVYYCARGYGYFD
YWGQGTLVTVSS [SEQ ID NO: 20]
TSGQAGQHHHHHHGAYPYDVPDYAS [SEQ ID NO: 308]

TABLE 6
ET200-008

DNA Sequence
(light chain variable region scFv linker heavy chain variable region His tag + HA tag)
caatctgccctgactcagcctgcctccgtgtctgggtctcctggacagtcgatcaccatctcctgcactggaaccagcagtgacgt
tggtggttataactatgtctcctggtaccaacaacacccaggcaaagcccccaaactcatgatttatgatgtcagtaatcggccctc
aggggtttctaatcgcttctctggctccaagtctggcaacacggcctccctgaccatctctgggctccaggctgaggacgaggct
gattattactgcagctcatatacaagcagcagcacttcgaaggtgttcggcggagggaccaagctgaccgtcctaggt [SEQ
ID NO: 21]
tctagaggtggtggtggtagcggcggcggcggctctggtggtggtggatccctcgagatggcc [SEQ ID NO: 305]
gaggtgcagctggtggagtctgggggaggtgtggtacggcctggggggtccctgagactctcctgtgcagcctctggatt
cacctttggtgattatggcatgagctgggtccgccaagctccagggaaggggctggagtgggtctctggtattaattgga
atggtggtagcacaggttatgcagactctgtgaagggccgattcaccatctccagagacaacgccaagaactccctgtat
ctgcaaatgaacagtctgagagccgaggacacggccgtatattactgtgcgcgctctaaatacaacttccatgtttactac
gattactggggtcaaggtactctggtgaccgtctcctca [SEQ ID NO: 22]
ACTAGTGGCCAGGCCGGCCAGCACCATCACCATCACCATGGCGCATACCCGT
ACGACGTTCCGGACTACGCTTCT [SEQ ID NO: 306]
Amino Acid Sequence
(light chain variable region scFv linker heavy chain variable region His tag + HA tag)
QSALTQPASVSGSPGQSITISCTGTSSDVGGYNYVSWYQQHPGKAPKLMIYDVSN
RPSGVSNRFSGSKSGNTASLTISGLQAEDEADYYCSSYTSSSTSKVFGGGTKLTVLG
[SEQ ID NO: 23]
SRGGGGSGGGGSGGGGSLEMA [SEQ ID NO: 307]
EVQLVESGGGVVRPGGSLRLSCAASGFTFGDYGMSWVRQAPGKGLEWVSG
INWNGGSTGYADSVKGRFTISRDNAKNSLYLQMNSLRAEDTAVYYCARSKY
NFHVYYDYWGQGTLVTVSS [SEQ ID NO: 24]
TSGQAGQHHHHHHGAYPYDVPDYAS [SEQ ID NO: 308]

TABLE 7
ET200-009

DNA Sequence
(light chain variable region scFv linker heavy chain variable region His tag + HA tag)
cagtctgtgttgacgcagccaccctcagcgtctgggacccccgggcagacagtcaccatctcttgttctggaagcaactccaac
atcggaagtaattatgtatactggtaccagcagctcccaggaacggcccccaaactcctcatctataggaataatcagcggccct
caggggtccctgaccgattctcaggctccaagtctggcacctcagcctccctggccatcagtgggctccgctccgaggatgag
gctgattattactgtgcagcatgggatgacagcctgagtgcttatgtcttcggaactgggaccaaggtcaccgtcctaggt
[SEQ ID NO: 25]
tctagaggtggtggtggtagcggcggcggcggctctggtggtggtggatccctcgagatggcc [SEQ ID NO: 305]
caggtgcagctggtgcagtctggagctgaggtgaagaagcctggggcctcagtgaaggtctcctgcaaggcttctggtt
acacctttaccagctatggtatcagctgggtgcgacaggcccctggacaagggcttgagtggatgggatggatcagcgc
ttacaatggtaacacaaactatgcacagaagctccagggcagagtcaccatgaccacagacacatccacgagcacagc
ctacatggagctgaggagcctgagatctgacgacactgccgtgtattactgtgcgcgctcttctggtaacatggtttcttgg
aaagatatgtggggtcaaggtactctggtgaccgtctcctca [SEQ ID NO: 26]
ACTAGTGGCCAGGCCGGCCAGCACCATCACCATCACCATGGCGCATACCCGT
ACGACGTTCCGGACTACGCTTCT [SEQ ID NO: 306]
Amino Acid Sequence
(light chain variable region scFv linker heavy chain variable region His tag + HA tag)
QSVLTQPPSASGTPGQTVTISCSGSNSNIGSNYVYWYQQLPGTAPKLLIYRNNQR
PSGVPDRFSGSKSGTSASLAISGLRSEDEADYYCAAWDDSLSAYVFGTGTKVTVLG
[SEQ ID NO: 27]
SRGGGGSGGGGSGGGGSLEMA [SEQ ID NO: 307]
QVQLVQSGAEVKKPGASVKVSCKASGYTFTSYGISWVRQAPGQGLEWMG
WISAYNGNTNYAQKLQGRVTMTTDTSTSTAYMELRSLRSDDTAVYYCARSS
GNMVSWKDMWGQGTLVTVSS [SEQ ID NO: 28]
TSGQAGQHHHHHHGAYPYDVPDYAS [SEQ ID NO: 308]

TABLE 8
ET200-010

DNA Sequence
(light chain variable region scFv linker heavy chain variable region His tag + HA tag)
caatctgccctgactcagcctgcctccgtgtctgggtctcctggacagtcgatcaccatctcctgcactggaaccagcagtgacgt
tggtggttataactctgtctcctggtaccaacaacacccaggcaaagcccccagactcatgatttatgatgtcagtaatcggccctc
aggggtttctaatcgcttctctggctccaagtctggcaacacggcctccctgaccatctctgggctccaggctgaggacgaggct
gattattactgcagctcatatacaagcagcagcacccctttagtcttcggaactgggaccaaggtcaccgtcctaggt [SEQ
ID NO: 29]
tctagaggtggtggtggtagcggcggcggcggctctggtggtggtggatccctcgagatggcc [SEQ ID NO: 305]
caggtgcagctggtgcagtctggggctgaggtgaagaagcctggggcctcagtgaaggtctcctgcaaggcttctggtt
acacctttaccagctatggtatcagctgggtgcgacaggcccctggacaagggcttgagtggatgggatggatcagcgc
ttacaatggtaacacaaactatgcacagaagctccagggcagagtcaccatgaccacagacacatccacgagcacagc
ctacatggagctgaggagcctgagatctgacgacacggccgtgtattactgtgcgcgcggtgctgttgcttaccatgattg
gggtcaaggtactctggtgaccgtctcctca [SEQ ID NO: 30]
ACTAGTGGCCAGGCCGGCCAGCACCATCACCATCACCATGGCGCATACCCGT
ACGACGTTCCGGACTACGCTTCT [SEQ ID NO: 306]
Amino Acid Sequence
(light chain variable region scFv linker heavy chain variable region His tag + HA tag)
QSALTQPASVSGSPGQSITISCTGTSSDVGGYNSVSWYQQHPGKAPRLMIYDVSN
RPSGVSNRFSGSKSGNTASLTISGLQAEDEADYYCSSYTSSSTPLVFGTGTKVTVLG
[SEQ ID NO: 31]
SRGGGGSGGGGSGGGGSLEMA [SEQ ID NO: 307]
QVQLVQSGAEVKKPGASVKVSCKASGYTFTSYGISWVRQAPGQGLEWMG
WISAYNGNTNYAQKLQGRVTMTTDTSTSTAYMELRSLRSDDTAVYYCARG
AVAYHDWGQGTLVTVSS [SEQ ID NO: 32]
TSGQAGQHHHHHHGAYPYDVPDYAS [SEQ ID NO: 308]

TABLE 9
ET200-011

DNA Sequence
(light chain variable region scFv linker heavy chain variable region His tag + HA tag)
cagtctgtcgtgacgcagccgccctcagtgtctgcggccccaggacagagggtcaccatctcctgctctggaagcagctccaa
catttcgatttatgatgtatcctggtatcagcagctcccaggaacagcccccaaactcctcatttatggcaataataagcgaccctc
ggggattgctgaccgattctctggctccacgtctggcacgtcagccaccctgggcatcaccggactccagactggggacgagg
ccgattattactgcggaacatgggatgacagtctgagtgggggggtgttcggcggagggaccaagctgaccgtcctaggt
[SEQ ID NO: 33]
tctagaggtggtggtggtagcggcggcggcggctctggtggtggtggatccctcgagatggcc [SEQ ID NO: 305]
cagatgcagctggtgcaatctggggctgaggtgaagaagcctgggtcctcggtgaaggtctcctgcgaggcttctggag
gcaccctcagcagctatgctatcaactgggtgcgacaggcccctggacaagggcttgagtggatgggagggatcatccc
tatgtttggtacagcacactacgcacagaagttccagggcagagtcacgattaccgcggacgaatccacgaaaacagc
ctacatggagctgagcagcctgagatctgaggacactgccgtgtattactgtgcgcgcggtgttcattacgcttctttcgat
cattggggtcaaggtactctggtgaccgtctcctca [SEQ ID NO: 34]
ACTAGTGGCCAGGCCGGCCAGCACCATCACCATCACCATGGCGCATACCCGT
ACGACGTTCCGGACTACGCTTCT [SEQ ID NO: 306]
Amino Acid Sequence
(light chain variable region scFv linker heavy chain variable region His tag + HA tag)
QSVVTQPPSVSAAPGQRVTISCSGSSSNISIYDVSWYQQLPGTAPKLLIYGNNKRP
SGIADRFSGSTSGTSATLGITGLQTGDEADYYCGTWDDSLSGGVFGGGTKLTVLG
[SEQ ID NO: 35]
SRGGGGSGGGGSGGGGSLEMA [SEQ ID NO: 307]
QMQLVQSGAEVKKPGSSVKVSCEASGGTLSSYAINWVRQAPGQGLEWMGG
IIPMFGTAHYAQKFQGRVTITADESTKTAYMELSSLRSEDTAVYYCARGVHY
ASFDHWGQGTLVTVSS [SEQ ID NO: 36]
TSGQAGQHHHHHHGAYPYDVPDYAS [SEQ ID NO: 308]

TABLE 10
ET200-012

DNA Sequence
(light chain variable region scFv linker heavy chain variable region His tag + HA tag)
cagtctgtgttgacgcagccgccctcagtgtctgcggccgcaggacagaaggtcaccatctcctgctctggaagcgactccaac
attgggaataattatgtgtcctggtatcaacacctcccagggacagcccccaaactcctcatttatgacgttaaaaatcgaccctca
gggattcctgaccggttctccggctccaagtctggctcgtcagccaccctaggcatcgccggactccagcctggggacgaggc
cgattattactgcggaacatgggacagtcggctggatgcctatgtcttcggaactgggaccaaggtcaccgtcctaggt [SEQ
ID NO: 37]
tctagaggtggtggtggtagcggcggcggcggctctggtggtggtggatccctcgagatggcc [SEQ ID NO: 305]
cagatgcagctggtgcaatctggagctgaggtgaagaagcctggggcctcagtgaaggtctcctgcaagacttctggttt
cccctttaatatctttggaatcacctgggtgcgacaggcccctggacaagggcttgagtggatgggatggatcagcggtt
acaacggtaacacagactacccacagaagttccagggcagagtcaccatgtccacagacacatccacgagtacagcct
acatggagctgaggaacctgaaatctgacgacacggccgtgtattactgtgcgcgcggtgcttacggtggtatggatact
tggggtcaaggtactctggtgaccgtctcctca [SEQ ID NO: 38]
ACTAGTGGCCAGGCCGGCCAGCACCATCACCATCACCATGGCGCATACCCGT
ACGACGTTCCGGACTACGCTTCT [SEQ ID NO: 306]
Amino Acid Sequence
(light chain variable region scFv linker heavy chain variable region His tag + HA tag)
QSVLTQPPSVSAAAGQKVTISCSGSDSNIGNNYVSWYQHLPGTAPKLLIYDVKNR
PSGIPDRFSGSKSGSSATLGIAGLQPGDEADYYCGTWDSRLDAYVFGTGTKVTVLG
[SEQ ID NO: 39]
SRGGGGSGGGGSGGGGSLEMA [SEQ ID NO: 307]
QMQLVQSGAEVKKPGASVKVSCKTSGFPFNIFGITWVRQAPGQGLEWMGW
ISGYNGNTDYPQKFQGRVTMSTDTSTSTAYMELRNLKSDDTAVYYCARGAY
GGMDTWGQGTLVTVSS [SEQ ID NO: 40]
TSGQAGQHHHHHHGAYPYDVPDYAS [SEQ ID NO: 308]

TABLE 11
ET200-013

DNA Sequence
(light chain variable region scFv linker heavy chain variable region His tag + HA tag)
cagtctgtcgtgacgcagccgccctcagtgtctggggccccagggcagagggtcaccatctcctgcactgggagcacctccaa
catcggggcaggttatgatgtacactggtatcagcagcttccaggaacagcccccaaactcctcatctatactaacaactttcggc
cctcaggggtccctgaccgattctctgcctccaagtctggcacttcagcttccctggccatcactggtctccaggctgaggatgag
gctgattattactgcggaacatgggatagcagcctgagtgccgttgtgttcggcggagggaccaagctgaccgtcctaggt
[SEQ ID NO: 41]
tctagaggtggtggtggtagcggcggcggcggctctggtggtggtggatccctcgagatggcc [SEQ ID NO: 305]
gaggtgcagctggtggagtctggaactgaggtgaagaagcctggggcctcagtgaaagtctcctgcaaggcttctggtt
acatgtttaccagttatggtctcaactgggtgcgacaggcccctggacaagggcttgagtggatgggatggatcagcgct
aacaatggtaagacaaattatgctaagaaattccaggacagagtcaccatgaccagagacacttccacgagcacaggc
tacatggaactgaggagcctgagatctgacgacacggccgtatattactgtgcgcgccatatcggtggttcttacttcgat
cgttggggtcaaggtactctggtgaccgtctcctca [SEQ ID NO: 42]
ACTAGTGGCCAGGCCGGCCAGCACCATCACCATCACCATGGCGCATACCCGT
ACGACGTTCCGGACTACGCTTCT [SEQ ID NO: 306]
Amino Acid Sequence
(light chain variable region scFv linker heavy chain variable region His tag + HA tag)
QSVVTQPPSVSGAPGQRVTISCTGSTSNIGAGYDVHWYQQLPGTAPKLLIYTNNF
RPSGVPDRFSASKSGTSASLAITGLQAEDEADYYCGTWDSSLSAVVFGGGTKLT
VLG [SEQ ID NO: 43]
SRGGGGSGGGGSGGGGSLEMA [SEQ ID NO: 307]
EVQLVESGTEVKKPGASVKVSCKASGYMFTSYGLNWVRQAPGQGLEWMG
WISANNGKTNYAKKFQDRVTMTRDTSTSTGYMELRSLRSDDTAVYYCARHI
GGSYFDRWGQGTLVTVSS [SEQ ID NO: 44]
TSGQAGQHHHHHHGAYPYDVPDYAS [SEQ ID NO: 308]

TABLE 12
ET200-014

DNA Sequence
(light chain variable region scFv linker heavy chain variable region His tag + HA tag)
tcctatgtgctgactcagccaccctcagtgtcagtggccccaggaaagacggccaggattacctgtgggggaaacaacattgga
agtaaaagtgtgcactggtaccagcagaagccaggccaggcccctgtgctggtcatctattatgatagcgaccggccctcagg
gatccctgagcgattctctggctccaactctgggaacacggccaccctgaccatcagcagggtcgaagccggggatgaggcc
gactattactgtcaggtgtgggatagtagtagtgatcattatgtcttcggaactgggaccaaggtcaccgtcctaggt [SEQ ID
NO: 45]
tctagaggtggtggtggtagcggcggcggcggctctggtggtggtggatccctcgagatggcc [SEQ ID NO: 305]
gaggtgcagctggtggagactgggggaggcttggtacagcctggggggtccctgagactctcctgtgcagcctctggatt
cacctttagcagctatgccatgagctgggtccgccaggctccagggaaggggctggagtgggtctcagctattagtggta
gtgatggtagcacatactacgcagactccgtgaagggccggttcaccatctccagagacaattccaagaacacgctgta
tctgcaaatgaacagcctgagagacgaggacacggccgtatattactgtgcgcgctctcatgaagctaacctggttggtg
attggtggggtcaaggtactctggtgaccgtctcctca [SEQ ID NO: 46]
ACTAGTGGCCAGGCCGGCCAGCACCATCACCATCACCATGGCGCATACCCGT
ACGACGTTCCGGACTACGCTTCT [SEQ ID NO: 306]
Amino Acid Sequence
(light chain variable region scFv linker heavy chain variable region His tag + HA tag)
SYVLTQPPSVSVAPGKTARITCGGNNIGSKSVHWYQQKPGQAPVLVIYYDSDRPS
GIPERFSGSNSGNTATLTISRVEAGDEADYYCQVWDSSSDHYVFGTGTKVTVLG
[SEQ ID NO: 47]
SRGGGGSGGGGSGGGGSLEMA [SEQ ID NO: 307]
EVQLVETGGGLVQPGGSLRLSCAASGFTFSSYAMSWVRQAPGKGLEWVSAI
SGSDGSTYYADSVKGRFTISRDNSKNTLYLQMNSLRDEDTAVYYCARSHEAN
LVGDWWGQGTLVTVSS [SEQ ID NO: 48]
TSGQAGQHHHHHHGAYPYDVPDYAS [SEQ ID NO: 308]

TABLE 13
ET200-015

DNA Sequence
(light chain variable region scFv linker heavy chain variable region His tag + HA tag)
cagtctgtggtgactcagccaccctcagtgtcagtggccccaggaaagacggccaggattacctgtgggggaaacaacattgg
aagtaaaagtgtgcactggtaccagcagaagccaggccaggcccctgtgctggtcatctattatgatagcgaccggccctcagg
gatccctgagcgattctctggctccaactctgggaacacggccaccctgaccatcagcagggtcgaagccggggatgaggcc
gactattactgtcaggtgtgggatagtagtagtgatgtggtattcggcggagggaccaagctgaccgtcctaggt [SEQ ID
NO: 49]
tctagaggtggtggtggtagcggcggcggcggctctggtggtggtggatccctcgagatggcc [SEQ ID NO: 305]
gaggtccagctggtacagtctggagctgaggtgaagaagcctggggcctcagtgaaggtctcctgcaaggcttctggtt
acacctttaccagctacggtatcagctgggtgcgacaggcccctggacaagggcttgagtggatgggatggatcagcgc
ttacaatggtaacacaaactatgcacagaagctccagggcagagtcaccatgaccacagacacatccacgagcacagc
ctacatggagctgaggagcctgagatctgacgacacggccgtgtattactgtgcgcgctggggtggtttcggtgctgttg
atcattggggtcaaggtactctggtgaccgtctcctca [SEQ ID NO: 50]
ACTAGTGGCCAGGCCGGCCAGCACCATCACCATCACCATGGCGCATACCCGT
ACGACGTTCCGGACTACGCTTCT [SEQ ID NO: 306]
Amino Acid Sequence
(light chain variable region scFv linker heavy chain variable region His tag + HA tag)
QSVVTQPPSVSVAPGKTARITCGGNNIGSKSVHWYQQKPGQAPVLVIYYDSDRP
SGIPERFSGSNSGNTATLTISRVEAGDEADYYCQVWDSSSDVVFGGGTKLTVLG
[SEQ ID NO: 51]
SRGGGGSGGGGSGGGGSLEMA [SEQ ID NO: 307]
EVQLVQSGAEVKKPGASVKVSCKASGYTFTSYGISWVRQAPGQGLEWMGW
ISAYNGNTNYAQKLQGRVTMTTDTSTSTAYMELRSLRSDDTAVYYCARWG
GFGAVDHWGQGTLVTVSS [SEQ ID NO: 52]
TSGQAGQHHHHHHGAYPYDVPDYAS [SEQ ID NO: 308]

TABLE 14
ET200-016

DNA Sequence
(light chain variable region scFv linker heavy chain variable region His tag + HA tag)
tcttctgagctgactcaggaccctgctgtgtctgtggccttgggacagacagtcaagatcacgtgccaaggagacagcctcaca
gactaccatgcaacctggtaccagcagaagccaggacaggcccctgtcgctgtcatctatgctacaaacaaccggcccactgg
gatcccagaccgattctctggttccagttccggaaacacagcttctttgaccatcactggggctcaggcggaagatgaggctgac
tattactgtaattcccgggacagcggcacggacgaagtgttattcggcggagggaccaagctgaccgtcctaggt [SEQ ID
NO: 53]
tctagaggtggtggtggtagcggcggcggcggctctggtggtggtggatccctcgagatggcc [SEQ ID NO: 305]
gaggtgcagctggtggagactgggggaggcctggtcaagcctggggggtccctgagactctcctgtgcagcctctggat
tcaccttcagtagctatagcatgaactgggtccgccaggctccagggaaggggctggagtgggtctcatccattagtagt
agtagtagttacatatactacgcagactcagtgaagggccgattcaccatctccagagacaacgccaagaactcactgt
atctgcaaatgaacagcctgagagccgaggacacggccgtgtattactgtgcgcgcggtcagggttacgattactgggg
tcaaggtactctggtgaccgtctcctca [SEQ ID NO: 54]
ACTAGTGGCCAGGCCGGCCAGCACCATCACCATCACCATGGCGCATACCCGT
ACGACGTTCCGGACTACGCTTCT [SEQ ID NO: 306]
Amino Acid Sequence
(light chain variable region scFv linker heavy chain variable region His tag + HA tag)
SSELTQDPAVSVALGQTVKITCQGDSLTDYHATWYQQKPGQAPVAVIYATNNRP
TGIPDRFSGSSSGNTASLTITGAQAEDEADYYCNSRDSGTDEVLFGGGTKLTVLG
[SEQ ID NO: 55]
SRGGGGSGGGGSGGGGSLEMA [SEQ ID NO: 307]
EVQLVETGGGLVKPGGSLRLSCAASGFTFSSYSMNWVRQAPGKGLEWVSSI
SSSSSYIYYADSVKGRFTISRDNAKNSLYLQMNSLRAEDTAVYYCARGQGYD
YWGQGTLVTVSS [SEQ ID NO: 56]
TSGQAGQHHHHHHGAYPYDVPDYAS [SEQ ID NO: 308]

TABLE 15
ET200-017

DNA Sequence
(light chain variable region scFv linker heavy chain variable region His tag + HA tag)
tcctatgtgctgactcagccaccctcggtgtcagtggccccaggaaagacggccaggat
tacctgtgggggaaacaacattggaagtaaaagtgtgcactggtaccagcagaagccag
gccaggcccctgtgctggtcgtctatgatgatagcgaccggccctcagggatccctgag
cgattctctggctccaactctgggaacacggccaccctgagcatcagcagggtcgaagc
cggggatgaggccgactattactgtcaggtgtgggatagtagtagtgatcatactgtct
tcggaactgggaccaaggtcaccgtcctaggt [SEQ ID NO: 57]
tctagaggtggtggtggtagcggcggcggcggctctggtggtggtggatccctcgagatggcc [SEQ ID NO: 305]
caggtgcagctacagcagtggggcgcaggactgttgaagccttcggagaccctgtccct
cacctgcgctgtctatggtgggtccttcagtggttactactggagctggatccgccagc
ccccagggaaggggctggagtggattggggaaatcaatcatagtggaagcaccaactac
aacccgtccctcaagagtcgagtcaccatatcagtagacacgtccaagaaccagttctc
cctgaagctgagctctgtgaccgccgcggacacggccgtgtattactgtgcgcgctact
acccgggtatggatatgtggggtcaaggtactctggtgaccgtctcctca [SEQ ID NO: 58]
ACTAGTGGCCAGGCCGGCCAGCACCATCACCATCACCATGGCGCATACCCGTACGACGT
TCCGGACTACGCTTCT [SEQ ID NO: 306]
Amino Acid Sequence
(light chain variable region scFv linker heavy chain variable region His tag + HA tag)
SYVLTQPPSVSVAPGKTARITCGGNNIGSKSVHWYQQKPGQAPVLVVYDDSDRPSGIPE
RFSGSNSGNTATLSISRVEAGDEADYYCQVWDSSSDHTVFGTGTKVTVLG [SEQ ID NO: 59]
SRGGGGSGGGGSGGGGSLEMA [SEQ ID NO: 307]
QVQLQQWGAGLLKPSETLSLTCAVYGGSFSGYYWSWIRQPPGKGLEWIGEINHSGSTNY
NPSLKSRVTISVDTSKNQFSLKLSSVTAADTAVYYCARYYPGMDMWGQGTLVTVSS
[SEQ ID NO: 60]
TSGQAGQHHHHHHGAYPYDVPDYAS [SEQ ID NO: 308]

TABLE 16
ET200-018

DNA Sequence
(light chain variable region scFv linker heavy chain variable region His tag + HA tag)
caggctgtgctgactcagccgccctcaacgtctgggacccccgggcagagggtcaccat
ctcttgttctggaagcagctccaacatcgggagaaatggtgtaaactggtaccagcagc
tcccaggagcggcccccaaagtcctcatctataatgataatcagcgaccctcaggggtc
cctgaccgagtctctggctcccagtctggctcctcaggcaccctggccatcgatgggct
tcggtctgaggatgaggctgattattactgtgcggcatgggatgacagcctgcatggtg
tggtattcggcggagggaccaagctgaccgtcctaggt [SEQ ID NO: 61]
tctagaggtggtggtggtagcggcggcggcggctctggtggtggtggatccctcgagatggcc [SEQ ID NO: 305]
caggtccagctggtacagtctggggctgaggtgaagaagcctggggcctcagtgaaggt
ctcctgcaaggtttccggatacaccctcaatgaattatccatgcactgggtgcgacagg
ctcctggaaaagggcttgagtggatgggaggttttgatcctgaagatggtgaaacaatc
tacgcacagaagttccagggcagagtcaccatgaccgaggacacatctacagacacagc
ctacatggagctgagcagcctgagatctgaggacactgccgtgtattactgtgcgcgcg
gtggttacggtgattcttggggtcaaggtactctggtgaccgtctcctca [SEQ ID NO: 62]
ACTAGTGGCCAGGCCGGCCAGCACCATCACCATCACCATGGCGCATACCCGTACGACGT
TCCGGACTACGCTTCT [SEQ ID NO: 306]
Amino Acid Sequence
(light chain variable region scFv linker heavy chain variable region His tag + HA tag)
QAVLTQPPSTSGTPGQRVTISCSGSSSNIGRNGVNWYQQLPGAAPKVLIYNDNQRPSGV
PDRVSGSQSGSSGTLAIDGLRSEDEADYYCAAWDDSLHGVVFGGGTKLTVLG [SEQ ID NO: 63]
SRGGGGSGGGGSGGGGSLEMA [SEQ ID NO: 307]
QVQLVQSGAEVKKPGASVKVSCKVSGYTLNELSMHWVRQAPGKGLEWMGGFDPEDGETI
YAQKFQGRVTMTEDTSTDTAYMELSSLRSEDTAVYYCARGGYGDSWGQGTLVTVSS
[SEQ ID NO: 64]
TSGQAGQHHHHHHGAYPYDVPDYAS [SEQ ID NO: 308]

TABLE 17
ET200-019

DNA Sequence
(light chain variable region scFv linker heavy chain variable region His tag + HA tag)
aattttatgctgactcagccccactctgtgtcggagtctccggggaagacggtaaccat
ctcctgcacccgcagcagtggcagcattgccagcaactatgtgcagtggtaccagcagc
gcccgggcagtgcccccaccactgtgatctatgaggataaccaaagaccctctggggtc
cctgatcggttctctggctccatcgacagctcctccaactctgcctccctcaccatctc
tggactgaagactgaggacgaggctgactactactgtcagtcttatgatagcagcaatt
cttgggtgttcggcggagggaccaagctgaccgtcctaggt [SEQ ID NO: 65]
tctagaggtggtggtggtagcggcggcggcggctctggtggtggtggatccctcgagatggcc [SEQ ID NO: 305]
caggtgcagctggtgcaatctggggctgaggtgaagaggcctgggtcctcggtgaaggt
ctcctgcacggcttctggaggcaccttcagcagcgatgctatcagctgggtgcgacagg
cccctggacaagggcttgagtggatgggaggaatcatccctatgtttggtacagcaaac
tacgcacagaagttccagggcagagtcacgattaccgcggacgaatccacgagcacagc
ctacatggagctgagcagcctgagatctgaggacacggccgtgtattactgtgcgcgcg
aaggttactactacccgtctgcttacctgggttctgttctgaacgacatctcttctgtt
tacgatgaatggggtcaaggtactctggtgaccgtctcctca [SEQ ID NO: 66]
ACTAGTGGCCAGGCCGGCCAGCACCATCACCATCACCATGGCGCATACCCGTACGACGT
TCCGGACTACGCTTCT [SEQ ID NO: 306]
Amino Acid Sequence
(light chain variable region scFv linker heavy chain variable region His tag + HA tag)
NFMLTQPHSVSESPGKTVTISCTRSSGSIASNYVQWYQQRPGSAPTTVIYEDNQRPSGV
PDRFSGSIDSSSNSASLTISGLKTEDEADYYCQSYDSSNSWVFGGGTKLTVLG [SEQ ID NO: 67]
SRGGGGSGGGGSGGGGSLEMA [SEQ ID NO: 307]
QVQLVQSGAEVKRPGSSVKVSCTASGGTFSSDAISWVRQAPGQGLEWMGGIIPMFGTAN
YAQKFQGRVTITADESTSTAYMELSSLRSEDTAVYYCAREGYYYPSAYLGSVLNDISSV
YDEWGQGTLVTVSS [SEQ ID NO: 68]
TSGQAGQHHHHHHGAYPYDVPDYAS [SEQ ID NO: 308]

TABLE 18
ET200-020

DNA Sequence
(light chain variable region scFv linker heavy chain variable region His tag + HA tag)
cagtctgtcgtgacgcagccgccctcagtgtctgcggccccaggacagaaggtcaccat
ctcctgctctggaagcacctccaacattggaaataatgatgtatcctggtaccagcagc
tcccaggaacagcccccaaactcctcatttatgacaataataagcgaccctcagggatt
cctgaccgattctctggctccaagtctggcacgtcagccaccctgggcatcaccggact
ccagactggggacgaggccgattattactgcggaacatgggatagcagcgtgagtgctt
cttgggtcttcggcagagggaccaagctgaccgtcctaggt [SEQ ID NO: 69]
tctagaggtggtggtggtagcggcggcggcggctctggtggtggtggatccctcgagatggcc [SEQ ID NO: 305]
caggtgcagctggtgcagtctggagctgaggtgaagaagcctggggcctcagtgaaggt
ctcctgcaaggcttctggttacacctttaccagctatggtatcagctgggtgcgacagg
cccctggacaagggcttgagtggatgggatggatcagcgcttacaatggtaacacaaac
tatccacagaagctccagggcagagtcaccatgaccacagacccatccacgagcacagc
ctacatggagctgaggagcctgagatctgacgacacggccgtgtattactgtgcgcgct
ctatgacttctttcgattactggggtcaaggtactctggtgaccgtctcctca [SEQ ID NO: 70]
ACTAGTGGCCAGGCCGGCCAGCACCATCACCATCACCATGGCGCATACCCGTACGACGT
TCCGGACTACGCTTCT [SEQ ID NO: 306]
Amino Acid Sequence
(light chain variable region scFv linker heavy chain variable region His tag + HA tag)
QSVVTQPPSVSAAPGQKVTISCSGSTSNIGNNDVSWYQQLPGTAPKLLIYDNNKRPSGI
PDRFSGSKSGTSATLGITGLQTGDEADYYCGTWDSSVSASWVFGRGTKLTVLG [SEQ ID NO: 71]
SRGGGGSGGGGSGGGGSLEMA [SEQ ID NO: 307]
QVQLVQSGAEVKKPGASVKVSCKASGYTFTSYGISWVRQAPGQGLEWMGWISAYNGNT
NYPQKLQGRVTMTTDPSTSTAYMELRSLRSDDTAVYYCARSMTSFDYWGQGTLVTVSS
[SEQ ID NO: 72]
TSGQAGQHHHHHHGAYPYDVPDYAS [SEQ ID NO: 308]

TABLE 19
ET200-021

DNA Sequence
(light chain variable region scFv linker heavy chain variable region His tag + HA tag)
cagtctgtgttgacgcagccgccctcagtgtctgcggccccaggacagaaggtcaccat
ctcctgctctggaagcaactccaacattgggaataattatgtatcctggtatcagcaac
tcccagggacagcccccaaactcctcatttatgacaataataagcgaccctcagggatt
cctgaccgattctctggctccaggtctggcacgtcagccaccctgggcatcaccggact
ccagactggggacgaggccgattattactgcggaacatggaataccactgtgactcctg
gctatgtcttcggaactgggaccaaggtcaccgtcctaggt [SEQ ID NO: 73]
tctagaggtggtggtggtagcggcggcggcggctctggtggtggtggatccctcgagatggcc [SEQ ID NO: 305]
gaagtgcagctggtgcagtctggagctgaggtgaagaagcctggggcctcagtgaaggt
ctcctgcaaggcttctggttacacctttaccagctatggtatcagctgggtgcgacagg
cccctggacaagggcttgagtggatgggatggatcagcgcttacaatggtaacacaaac
tatgcacagaagctccagggcagagtcaccatgaccacagacacatccacgagcacagc
ctacatggagctgaggagcctgagatctgacgacaccgccatgtattactgtgcgcgct
ctgtttacgacctggatacttggggtcaaggtactctggtgaccgtctcctca [SEQ ID NO: 74]
ACTAGTGGCCAGGCCGGCCAGCACCATCACCATCACCATGGCGCATACCCGTACGACGT
TCCGGACTACGCTTCT [SEQ ID NO: 306]
Amino Acid Sequence
(light chain variable region scFv linker heavy chain variable region His tag + HA tag)
QSVLTQPPSVSAAPGQKVTISCSGSNSNIGNNYVSWYQQLPGTAPKLLIYDNNKRPSGI
PDRFSGSRSGTSATLGITGLQTGDEADYYCGTWNTTVTPGYVFGTGTKVTVLG [SEQ ID NO: 75]
SRGGGGSGGGGSGGGGSLEMA [SEQ ID NO: 307]
EVQLVQSGAEVKKPGASVKVSCKASGYTFTSYGISWVRQAPGQGLEWMGWISAYNGNT
NYAQKLQGRVTMTTDTSTSTAYMELRSLRSDDTAMYYCARSVYDLDTWGQGTLVTVSS
[SEQ ID NO: 76]
TSGQAGQHHHHHHGAYPYDVPDYAS [SEQ ID NO: 308]

TABLE 20
ET200-022

DNA Sequence
(light chain variable region scFv linker heavy chain variable region His tag + HA tag)
cagtctgtcgtgacgcagccgccctcagtgtctgcggccccaggacagaaggtcaccat
ctcctgctctggaagcagctccaacattgggaataattatgtatcctggtaccagcagc
tcccaggaacagcccccaaactcctcatttatgacaataataagcgaccctcagggatt
cctgaccgattctctggctccaagtctggcacgtcagccaccctgggcatcaccggact
ccagactggggacgaggccgattattactgcggaacatgggatagcagcctgggggccc
cttatgtcttcggaactgggaccaaggtcaccgtcctaggt [SEQ ID NO: 77]
tctagaggtggtggtggtagcggcggcggcggctctggtggtggtggatccctcgagatggcc [SEQ ID NO: 305]
gaggtgcagctggtgcagtcttggggaggctcggaacagcctggcaggtccctgagact
ctcctgtgcagcctctggattcacctttgatgattatgccatgcactgggtccggcaag
ctccagggaagggcctggagtgggtctcaggtattagttggaatagcggtagcataggc
tatgcggactctgtgaagggccgattcaccatctccagagacaacgccaagaattccct
gtatctgcaaatgaacagtctgagagctgaggacaccgccatgtattactgtgcgcgct
accgtcaggttggttctgcttacgattcttggggtcaaggtactctggtgaccgtctcc
tca [SEQ ID NO: 78]
ACTAGTGGCCAGGCCGGCCAGCACCATCACCATCACCATGGCGCATACCCGTACGACGT
TCCGGACTACGCTTCT [SEQ ID NO: 306]
Amino Acid Sequence
(light chain variable region scFv linker heavy chain variable region His tag + HA tag)
QSVVTQPPSVSAAPGQKVTISCSGSSSNIGNNYVSWYQQLPGTAPKLLIYDNNKRPSGI
PDRFSGSKSGTSATLGITGLQTGDEADYYCGTWDSSLGAPYVFGTGTKVTVLG [SEQ ID NO: 79]
SRGGGGSGGGGSGGGGSLEMA [SEQ ID NO: 307]
EVQLVQSWGGSEQPGRSLRLSCAASGFTFDDYAMHWVRQAPGKGLEWVSGISWNSGSI
GYADSVKGRFTISRDNAKNSLYLQMNSLRAEDTAMYYCARYRQVGSAYDSWGQGTLVT
VSS [SEQ ID NO: 80]
TSGQAGQHHHHHHGAYPYDVPDYAS [SEQ ID NO: 308]

TABLE 21
ET200-023

DNA Sequence
(light chain variable region scFv linker heavy chain variable region His tag + HA tag)
ctgcctgtgctgactcagccaccctcggtgtcagtggccccaggaaagacggccaggat
tacctgtgggggaaacaacattggaagtaaaagtgtgcactggtatcagcagaagccag
gccaggcccctgtgctggtcgtctatgctgatagcgaccggccctcagggatccctgag
cgattctctggctccaactctgggaacacggccaccctgaccatcagcagggtcgaagc
cggggatgaggccgactattactgtcaggtgtgggatagtagtagttatcataattatg
tcttcggaactgggaccaaggtcaccgtcctaggt [SEQ ID NO: 81]
tctagaggtggtggtggtagcggcggcggcggctctggtggtggtggatccctcgagatggcc [SEQ ID NO: 305]
gaggtgcagctggtgcagtctggagctgaggtgaagaagcctggggcctcagtgaaggt
ctcctgcaaggcttctggttacacctttaccagctatggtatcagctgggtgcgacagg
cccctggacaagggcttgagtggatgggatggatcagcgcttacaatggtaacacaaac
tatgcacagaagctccagggcagagtcaccatgaccacagacacatccacgagcacagc
ctacatggagctgagcagcctgagatctgaggacaccgccatgtattactgtgcgcgct
actggggtttcggtgtttctgatcgttggggtcaaggtactctggtgaccgtctcctca [SEQ ID NO: 82]
ACTAGTGGCCAGGCCGGCCAGCACCATCACCATCACCATGGCGCATACCCGTACGACGT
TCCGGACTACGCTTCT [SEQ ID NO: 306]
Amino Acid Sequence
(light chain variable region scFv linker heavy chain variable region His tag + HA tag)
LPVLTQPPSVSVAPGKTARITCGGNNIGSKSVHWYQQKPGQAPVLVVYADSDRPSGIPE
RFSGSNSGNTATLTISRVEAGDEADYYCQVWDSSSYHNYVFGTGTKVTVLG [SEQ ID NO: 83]
SRGGGGSGGGGSGGGGSLEMA [SEQ ID NO: 307]
EVQLVQSGAEVKKPGASVKVSCKASGYTFTSYGISWVRQAPGQGLEWMGWISAYNGNT
NYAQKLQGRVTMTTDTSTSTAYMELSSLRSEDTAMYYCARYWGFGVSDRWGQGTLVTV
SS [SEQ ID NO: 84]
TSGQAGQHHHHHHGAYPYDVPDYAS [SEQ ID NO: 308]

TABLE 22
ET200-024

DNA Sequence
(light chain variable region scFv linker heavy chain variable region His tag + HA tag)
aattttatgctgactcagccccactctgtgtcggagtctccggggaagacggtaaccat
ctcctgcaccggcagcagtggcagcattgccagcaactatgtgcagtggtaccagcagc
gcccgggcagtgcccccaccactgtgatctatgaggataaccaaagaccctctggggtc
cccgatcggttctctggctccatcgacagctcctccaactctgcctccctcaccatctc
tggactgaagactgaggacgaggctgactactactgtcagtcttatgacagcagcaatc
tttgggtgttcggcggagggaccaagctgaccgtcctaggt [SEQ ID NO: 85]
tctagaggtggtggtggtagcggcggcggcggctctggtggtggtggatccctcgagatggcc [SEQ ID NO: 305]
cagatgcagctggtgcagtctggggctgaggtgaagaagcctgggtcctcggtgaaggt
ctcctgcaaggcttctggaggcaccttcagcagctatgctatcagctgggtgcgacagg
cccctggacaagggcttgagtggatgggagggatcatccctatctttggtacagcaaac
tacgcacagaagttccagggcagagtcacgattaccgcggacgaatccacgagcacagc
ctacatggagctgagcagcctgagatctgaggacactgccgtgtattactgtgcgcgct
acaactactactactacgattcttggggtcaaggtactctggtgaccgtctcctca
[SEQ ID NO: 86]
ACTAGTGGCCAGGCCGGCCAGCACCATCACCATCACCATGGCGCATACCCGTACGACGT
TCCGGACTACGCTTCT [SEQ ID NO: 306]
Amino Acid Sequence
(light chain variable region scFv linker heavy chain variable region His tag + HA tag)
NFMLTQPHSVSESPGKTVTISCTGSSGSIASNYVQWYQQRPGSAPTTVIYEDNQRPSGV
PDRFSGSIDSSSNSASLTISGLKTEDEADYYCQSYDSSNLWVFGGGTKLTVLG [SEQ ID NO: 87]
SRGGGGSGGGGSGGGGSLEMA [SEQ ID NO: 307]
QMQLVQSGAEVKKPGSSVKVSCKASGGTFSSYAISWVRQAPGQGLEWMGGIIPIFGTA
NYAQKFQGRVTITADESTSTAYMELSSLRSEDTAVYYCARYNYYYYDSWGQGTLVTVSS [SEQ ID NO: 88]
TSGQAGQHHHHHHGAYPYDVPDYAS [SEQ ID NO: 308]

TABLE 23
ET200-025

DNA Sequence
(light chain variable region scFv linker heavy chain variable region His tag + HA tag)
gacatccagatgacccagtctccatcctccctgtctgcatctgtaggagacagagtcac
catcacttgccgggcaagtcagagcattagcagctatttaaattggtatcagcagaaac
cagggaaagcccctaagctcctgatctatgctgcatccagtttgcaaagtggggtccca
tcaaggttcagtggcagtggatctgggacagatttcactctcaccatcagcagtctgca
acctgaagattttgcaacttactactgtcaacagagttacagtaccccattcactttcg
gccctgggaccaaagtggatatcaaacgt [SEQ ID NO: 89]
tctagaggtggtggtggtagcggcggcggcggctctggtggtggtggatccctcgagatggcc [SEQ ID NO: 305]
gaggtgcagctggtgcagtctggggctgaggtgaagaagcctgggtcctcggtgaaggt
ctcctgcaaggcttctggaggcaccttcagcagctatgctatcagctgggtgcgacagg
cccctggacaagggcttgagtggatgggagggatcatccctatctttggtacagcaaac
tacgcacagaagttccagggcagagtcacgattaccgcggacgaatccacgagcacagc
ctacatggagctgagcagcctgagatctgaggacaccgccatgtattactgtgcgcgct
actggggttacgactcttacgatgaatggggtcaaggtactctggtgaccgtctcctca [SEQ ID NO: 90]
ACTAGTGGCCAGGCCGGCCAGCACCATCACCATCACCATGGCGCATACCCGTACGACGT
TCCGGACTACGCTTCT [SEQ ID NO: 306]
Amino Acid Sequence
(light chain variable region scFv linker heavy chain variable region His tag + HA tag)
DIQMTQSPSSLSASVGDRVTITCRASQSISSYLNWYQQKPGKAPKLLIYAASSLQSGVP
SRFSGSGSGTDFTLTISSLQPEDFATYYCQQSYSTPFTFGPGTKVDIKR [SEQ ID NO: 91]
SRGGGGSGGGGSGGGGSLEMA [SEQ ID NO: 307]
EVQLVQSGAEVKKPGSSVKVSCKASGGTFSSYAISWVRQAPGQGLEWMGGIIPIFGTA
NYAQKFQGRVTITADESTSTAYMELSSLRSEDTAMYYCARYWGYDSYDEWGQGTLVTVSS [SEQ ID NO: 92]
TSGQAGQHHHHHHGAYPYDVPDYAS [SEQ ID NO: 308]

TABLE 24
ET200-026

DNA Sequence
(light chain variable region scFv linker heavy chain variable region His tag + HA tag)
aattttatgctgactcagccccactctgtgtcggagtctccggggaagacggtaaccat
ctcctgcaccggcagcagtggcagcattgccagcaactatgtgcagtggtaccagcagc
gcccgggcagtgcccccaccactgtgatctatgaggataaccaaagaccctctggggtc
cctgatcggttctctggctccatcgacagctcctccaactctgcctccctcaccatctc
tggactgaagactgaggacgaggctgactactactgtcagtcttatgatagcagcaatt
gggtgttcggcggagggaccaagctgaccgtcctaggt [SEQ ID NO: 93]
tctagaggtggtggtggtagcggcggcggcggctctggtggtggtggatccctcgagatggcc [SEQ ID NO: 305]
gaggtccagctggtgcagtctggggctgaggtgaagaagcctgggtcctcggtgaaggt
ctcctgcaaggcttctggaggcaccttcagcagctatgctatcagctgggtgcgacagg
cccctggacaagggcttgagtggatgggagggatcatccctatctttggtacagcaaac
tacgcacagaagttccagggcagagtcacgattaccgcggacgaatccacgagcacagc
ctacatggagctgagcagcctgagatctgaggacacggccgtgtattactgtgcgcgca
acaaccattactacaacgattactggggtcaaggtactctggtgaccgtctcctca [SEQ ID NO: 94]
ACTAGTGGCCAGGCCGGCCAGCACCATCACCATCACCATGGCGCATACCCGTACGACGTTC
CGGACTACGCTTCT [SEQ ID NO: 306]
Amino Acid Sequence
(light chain variable region scFv linker heavy chain variable region His tag + HA tag)
NFMLTQPHSVSESPGKTVTISCTGSSGSIASNYVQWYQQRPGSAPTTVIYEDNQRPSGV
PDRFSGSIDSSSNSASLTISGLKTEDEADYYCQSYDSSNWVFGGGTKLTVLG [SEQ ID NO: 95]
SRGGGGSGGGGSGGGGSLEMA [SEQ ID NO: 307]
EVQLVQSGAEVKKPGSSVKVSCKASGGTFSSYAISWVRQAPGQGLEWMGGIIPIFGTA
NYAQKFQGRVTITADESTSTAYMELSSLRSEDTAVYYCARNNHYYNDYWGQGTLVTVSS [SEQ ID NO: 96]
TSGQAGQHHHHHHGAYPYDVPDYAS [SEQ ID NO: 308]

TABLE 25
ET200-027

DNA Sequence
(light chain variable region scFv linker heavy chain variable region His tag + HA tag)
cagtctgtgttgacgcagccgccctcagtgtctggggccccagggcagggggtcaccat
cccctgcactgggagcagctccaacatcggggcaggttatgatgtacactggtaccagc
agcttccagggacagcccccaaactcctcatctatggtaacaacaatcggccctcaggg
gtccctgaccgcttctctggctccaggtctggctcctcagcctccctggccatcactgg
gctccaggctgaggatgaggctgattattactgccagtcctatgacagcagcctgagtg
atgtggtattcggcggagggaccaaggtcaccgtcctaggt [SEQ ID NO: 97]
tctagaggtggtggtggtagcggcggcggcggctctggtggtggtggatccctcgagatggcc [SEQ ID NO: 305]
gaggtccagctggtgcagtctggggctgaggtgaagaagcctggggctacagtgaaaat
ctcctgcaaggtttctggatacaccttcaccgactactacatgcactgggtgcaacagg
cccctggaaaagggcttgagtggatgggacttgttgatcctgaagatggtgaaacaata
tacgcagagaagttccagggcagagtcaccataaccgcggacacgtctacagacacagc
ctacatggagctgagcagcctgagatctgaggacacggccgtgtattactgtgcgcgct
actggtcttactctttcgactacctgtacatgccggaaggtaacgattggtggggtcaa
ggtactctggtgaccgtctcctca [SEQ ID NO: 98]
ACTAGTGGCCAGGCCGGCCAGCACCATCACCATCACCATGGCGCATACCCGTACGACGT
TCCGGACTACGCTTCT [SEQ ID NO: 306]
Amino Acid Sequence
(light chain variable region scFv linker heavy chain variable region His tag + HA tag)
QSVLTQPPSVSGAPGQGVTIPCTGSSSNIGAGYDVHWYQQLPGTAPKLLIYGNNNRPSG
VPDRFSGSRSGSSASLAITGLQAEDEADYYCQSYDSSLSDVVFGGGTKVTVLG [SEQ ID NO: 99]
SRGGGGSGGGGSGGGGSLEMA [SEQ ID NO: 307]
EVQLVQSGAEVKKPGATVKISCKVSGYTFTDYYMHWVQQAPGKGLEWMGLVDPEDGET
IYAEKFQGRVTITADTSTDTAYMELSSLRSEDTAVYYCARYWSYSFDYLYMPEGNDWW
GQGTLVTVSS [SEQ ID NO: 100]
TSGQAGQHHHHHHGAYPYDVPDYAS [SEQ ID NO: 308]

TABLE 26
ET200-028

DNA Sequence
(light chain variable region scFv linker heavy chain variable region His tag + HA tag)
cagtctgtgttgactcagccacccgcagcgtctgggacccccggacagagagtcaccat
ctcttgttctgggggcgtctccaacatcgggagtggtgctctaaattggtaccagcaac
tcccaggaacggcccccaaactcctcatctatagttacaatcagcggccctcaggggtc
tctgaccgattctctggctccaggtctgccacctcagcctccctggccatcagtgggct
ccagtctgaggatgaggctgattattactgtgcaacctgggatgatagtgtgaatggtt
gggtgttcggcggagggaccaagctgaccgtcctaggt [SEQ ID NO: 101]
tctagaggtggtggtggtagcggcggcggcggctctggtggtggtggatccctcgagatggcc [SEQ ID NO: 305]
caggtccagctggtacagtctggagctgaggtgaagaagcctggggattcagtgaaggt
ctcctgcaagccttctggttacaattttctcaactatggtatcaactgggtgcgacagg
cccctggacaagggcttgagtggatgggatggattagcacttacaccggtaacacaaac
tatgcacagaagctgcagggcagagtcaccttcaccacagacacatccacgagcacagc
ctacatggagatgaggagcctgagatctgacgacacggccgtgtattactgtgcgcgcg
acctgtactactacgaaggtgttgattactggggtcaaggtactctggtgaccgtctcctca [SEQ ID NO: 102]
ACTAGTGGCCAGGCCGGCCAGCACCATCACCATCACCATGGCGCATACCCGTACGACGT
TCCGGACTACGCTTCT [SEQ ID NO: 306]
Amino Acid Sequence
(light chain variable region scFv linker heavy chain variable region His tag + HA tag)
QSVLTQPPAASGTPGQRVTISCSGGVSNIGSGALNWYQQLPGTAPKLLIYSYNQRPSGV
SDRFSGSRSATSASLAISGLQSEDEADYYCATWDDSVNGWVFGGGTKLTVLG [SEQ ID NO: 103]
SRGGGGSGGGGSGGGGSLEMA [SEQ ID NO: 307]
QVQLVQSGAEVKKPGDSVKVSCKPSGYNFLNYGINWVRQAPGQGLEWMGWISTYTGNTN
YAQKLQGRVTFTTDTSTSTAYMEMRSLRSDDTAVYYCARDLYYYEGVDYWGQGTLVTVSS [SEQ ID NO: 104]
TSGQAGQHHHHHHGAYPYDVPDYAS [SEQ ID NO: 308]

TABLE 27
ET200-029

DNA Sequence
(light chain variable region scFv linker heavy chain variable region His tag + HA tag)
caggctgtgctgactcagccaccctcagtgtcagtggccccaggaaagacggccagggt
tacctgtgggggaaacaacattggaagtgaaagtgtgcactggtaccagcagaagccag
gccaggcccctgtgttggtcatctattatgataccgaccggccctcagggatccctgag
cgattctctggctcccactctgggaccacggccaccctgaccatcagcagggtcgaagc
cggggatgaggccgactattactgtcaggtgtgggatagtagtagggatcatgtggtat
tcggcggagggaccaagctgaccgtcctaggt [SEQ ID NO: 105]
tctagaggtggtggtggtagcggcggcggcggctctggtggtggtggatccctcgagatggcc [SEQ ID NO: 305]
caggtgcagctggtgcagtctgggggaggcgtggtccagcctgggaggtccctgagact
ctcctgtgcggcctctggattcaccttcagtagctatgctatgcactgggtccgccagg
ctccaggcaagggactggagtgggtggcagttatatcatatgatggaagcaataaatac
tacgcagactccgtgaagggcctattcaccatctccagagacaattccaagaacacgct
gtatctgcaaatgaacagcctgagagctgaggacacggccgtgtattactgtgcgcgct
cttacttcacttctggtttctacgattactggggtcaaggtactctggtgaccgtctcctca [SEQ ID NO: 106]
ACTAGTGGCCAGGCCGGCCAGCACCATCACCATCACCATGGCGCATACCCGTACGACGT
TCCGGACTACGCTTCT [SEQ ID NO: 306]
Amino Acid Sequence
(light chain variable region scFv linker heavy chain variable region His tag + HA tag)
QAVLTQPPSVSVAPGKTARVTCGGNNIGSESVHWYQQKPGQAPVLVIYYDTDRPSGIPE
RFSGSHSGTTATLTISRVEAGDEADYYCQVWDSSRDHVVFGGGTKLTVLG [SEQ ID NO: 107]
SRGGGGSGGGGSGGGGSLEMA [SEQ ID NO: 307]
QVQLVQSGGGVVQPGRSLRLSCAASGFTFSSYAMHWVRQAPGKGLEWVAVISYDGSN
KYYADSVKGLFTISRDNSKNTLYLQMNSLRAEDTAVYYCARSYFTSGFYDYWGQGTLVTVSS [SEQ ID NO: 108]
TSGQAGQHHHHHHGAYPYDVPDYAS [SEQ ID NO: 308]

TABLE 28
ET200-030

DNA Sequence
(light chain variable region scFv linker heavy chain variable region His tag + HA tag)
cagtctgtcgtgacgcagccgccctcagtgtctggggccccagggcagagggtcaccatctcctgcactgggagcagttccaacatcggggca
ggttatgatgtaaattggtatcagcagtttccaggaacagcccccaaactcctcatctatggtaacagcaatcggccctcaggggtccctgaccgat
tctctggctccaagtctggcacctcagcctccctggccatcactgggctccaggctgaggatgaggctgattattactgccagtcctatgacagca
gcctgagtggctcttatgtcttcggaactgggaccaaggtcaccgtcctaggt [SEQ ID NO: 109]
tctagaggtggtggtggtagcggcggcggcggctctggtggtggtggatccctcgagatggcc [SEQ ID NO: 305]
cagatgcagctggtgcagtctggggctgaggtgaagaagcctggggcctcagtgaaggtctcctgcaaggcttccggatacaccctcac
tgaattatccatgcactgggtgcgacaggctcctggaaaagggcttgagtggatgggaggttttgatcctgaagatggtgaaacaatcta
cgcacagaagttccagggcagagtcaccatgaccgaggacacatctacagacacagcctacatggagctgagcagcctgagatctga
ggacactgccgtgtattactgtgcgcgcatgtcttctatgtactacgattggggtcaaggtactctggtgaccgtctcctca
[SEQ ID NO: 110]
ACTAGTGGCCAGGCCGGCCAGCACCATCACCATCACCATGGCGCATACCCGTACGACGT
TCCGGACTACGCTTCT [SEQ ID NO: 306]
Amino Acid Sequence
(light chain variable region scFv linker heavy chain variable region His tag + HA tag)
QSVVTQPPSVSGAPGQRVTISCTGSSSNIGAGYDVNWYQQFPGTAPKLLIYGNSNRPSGVPD
RFSGSKSGTSASLAITGLQAEDEADYYCQSYDSSLSGSYVFGTGTKVTVLG [SEQ ID NO: 111]
SRGGGGSGGGGSGGGGSLEMA [SEQ ID NO: 307]
QMQLVQSGAEVKKPGASVKVSCKASGYTLTELSMHWVRQAPGKGLEWMGGFDPED
GETIYAQKFQGRVTMTEDTSTDTAYMELSSLRSEDTAVYYCARMSSMYYDWGQGTL
VTVSS [SEQ ID NO: 112]
TSGQAGQHHHHHHGAYPYDVPDYAS [SEQ ID NO: 308]

TABLE 29
ET200-031

DNA Sequence
(light chain variable region scFv linker heavy chain variable region His tag + HA tag)
tcctatgtgctgactcagccaccctcagtgtcagtggccccaggaaagacggccaggattacctgtgggggaaacaacattggaagtaaaagtg
tgcactggtaccagcagaagccaggccaggcccctgtgctggtcatctattatgatagcgaccggccctcagggatccctgagcgattctctggc
tccaactctgggaacacggccaccctgaccatcagcagggtcgaagccggggatgaggccgactattactgtcaggtgtgggatagtagtagtg
attatgtcttcggaactgggaccaaggtcaccgtcctaggt [SEQ ID NO: 113]
tctagaggtggtggtggtagcggcggcggcggctctggtggtggtggatccctcgagatggcc [SEQ ID NO: 305]
gaggtgcagctggtggagactgggggaggcttggtcaagcctggagggtccctgagactctcctgtgcagcctctggattcaccgtcagt
gactactacatgagctggatccgccaggctccagggaagggcctggagtggatttcatacattagtggtagtggtaatagcatatactac
gcagactctgtgaagggccgattcaccatctccagggacaacgccaagaactcactggatctgcaaatgaccagcctgagagccgagg
acacggccgtatattactgtgcgcgctctactaaattcgattactggggtcaaggtactctggtgaccgtctcctca [SEQ ID NO: 114]
ACTAGTGGCCAGGCCGGCCAGCACCATCACCATCACCATGGCGCATACCCGTACGACGT
TCCGGACTACGCTTCT [SEQ ID NO: 306]
Amino Acid Sequence
(light chain variable region scFv linker heavy chain variable region His tag + HA tag)
SYVLTQPPSVSVAPGKTARITCGGNNIGSKSVHWYQQKPGQAPVLVIYYDSDRPSGIPERFS
GSNSGNTATLTISRVEAGDEADYYCQVWDSSSDYVFGTGTKVTVLG [SEQ ID NO: 115]
SRGGGGSGGGGSGGGGSLEMA [SEQ ID NO: 307]
EVQLVETGGGLVKPGGSLRLSCAASGFTVSDYYMSWIRQAPGKGLEWISYISGSGNSIY
YADSVKGRFTISRDNAKNSLDLQMTSLRAEDTAVYYCARSTKFDYWGQGTLVTVSS [SEQ ID NO: 116]
TSGQAGQHHHHHHGAYPYDVPDYAS [SEQ ID NO: 308]

TABLE 30
ET200-032

DNA Sequence
(light chain variable region scFv linker heavy chain variable region His tag + HA tag)
ctgcctgtgctgactcagccaccctcagcgtctgggacccccgggcagagggtcaccatctcttgttctggaagcagctccaacgtcggaagtta
cactgtaaactggtaccggcaactcccaggaacggcccccacactcctcatctataataataatcagcggccctcaggggtccctgaccgattctc
tgactccaagtctggcacctcggcctccctgaccattagtgggctccagcctgaggatgaggctgattattattgtgcagcatgggatgacaggct
gggtggttatgtcttcggaactgggaccaaggtcaccgtcctaggt [SEQ ID NO: 117]
tctagaggtggtggtggtagcggcggcggcggctctggtggtggtggatccctcgagatggcc [SEQ ID NO: 305]
gaggtgcagctggtgcagtctggagcagaggtgaaaaagccgggggagtctctgaagatctcctgtaagggttctggatacagctttac
caactactggatcggctgggtgcgccagatgcccgggaaaggcctggagtggatggggatcatctatcctggtgactctgataccagat
acagcccgtccttccaaggccaggtcaccatctcagccgacaagtccatcagcaccgcctacctacagtggagcagcctgaaggcctcg
gacaccgccatgtattactgtgcgcgctctactggttcttctcatatgtctgatgaatggggtcaaggtactctggtgaccgtctcctca
[SEQ ID NO: 118]
ACTAGTGGCCAGGCCGGCCAGCACCATCACCATCACCATGGCGCATACCCGTACGACGT
TCCGGACTACGCTTCT [SEQ ID NO: 306]
Amino Acid Sequence
(light chain variable region scFv linker heavy chain variable region His tag + HA tag)
LPVLTQPPSASGTPGQRVTISCSGSSSNVGSYTVNWYRQLPGTAPTLLIYNNNQRPSGVPDRF
SDSKSGTSASLTISGLQPEDEADYYCAAWDDRLGGYVFGTGTKVTVLG [SEQ ID NO: 119]
SRGGGGSGGGGSGGGGSLEMA [SEQ ID NO: 307]
EVQLVQSGAEVKKPGESLKISCKGSGYSFTNYWIGWVRQMPGKGLEWMGIIYPGDSD
TRYSPSFQGQVTISADKSISTAYLQWSSLKASDTAMYYCARSTGSSHMSDEWGQGTLV
TVSS [SEQ ID NO: 120]
TSGQAGQHHHHHHGAYPYDVPDYAS [SEQ ID NO: 308]

TABLE 31
ET200-033

DNA Sequence
(light chain variable region scFv linker heavy chain variable region His tag + HA tag)
aattttatgctgactcagccccactctgtgtcggagtctccggggaagacggtaaccatctcctgcaccggcagcagtggcagcattgccagcaa
ctatgtgcagtggtaccagcagcgcccgggcagtgcccccaccactgtgatctatgaggataaccaaagaccctctggggtccctgatcggttct
ctggctccatcgacagctcctccaactctgcctccctcaccatctctggactgaagactgaggacgaggctgactactactgtcagtcttatgatag
cagcaatcattgggtgttcggcggagggaccaagctgaccgtcctaggt [SEQ ID NO: 121]
tctagaggtggtggtggtagcggcggcggcggctctggtggtggtggatccctcgagatggcc [SEQ ID NO: 305]
caagtgcagctacagcagtggggcgcaggactgttgaagccttcggagaccctgtccctcacctgcgctgtctatggtgggtccttcagt
ggttactactggagctggatccgccagcccccagggaaggggctggagtggattggggagatcactcatagtggaaggtccaactaca
acccgtccctcaagagtcgagtcaccatatcagtagacacgtccaagaaccagttctccctgaagctgagctctgtgaccgccgcggac
acggccgtgtattactgtgcgcgctcttctatcatgtctgattactggggtcaaggtactctggtgaccgtctcctca [SEQ ID NO: 122]
ACTAGTGGCCAGGCCGGCCAGCACCATCACCATCACCATGGCGCATACCCGTACGACGT
TCCGGACTACGCTTCT [SEQ ID NO: 306]
Amino Acid Sequence
(light chain variable region scFv linker heavy chain variable region His tag + HA tag)
NFMLTQPHSVSESPGKTVTISCTGSSGSIASNYVQWYQQRPGSAPTTVIYEDNQRPSGVPDR
FSGSIDSSSNSASLTISGLKTEDEADYYCQSYDSSNHWVFGGGTKLTVLG [SEQ ID NO: 123]
SRGGGGSGGGGSGGGGSLEMA [SEQ ID NO: 307]
QVQLQQWGAGLLKPSETLSLTCAVYGGSFSGYYWSWIRQPPGKGLEWIGEITHSGRS
NYNPSLKSRVTISVDTSKNQFSLKLSSVTAADTAVYYCARSSIMSDYWGQGTLVTVSS [SEQ ID NO: 124]
TSGQAGQHHHHHHGAYPYDVPDYAS [SEQ ID NO: 308]

TABLE 32
ET200-034

DNA Sequence
(light chain variable region scFv linker heavy chain variable region His tag + HA tag)
cagtctgtgttgacgcagccgccctcagtgtctggggccccagggcagagggtcaccatctcctgcactgggagcacctccaacatcggggca
ggttatgatgtacactggtaccagcagcttccaggaacagcccccaaactcctcatcaacaataacaggaatcggccctcaggggtccctgacc
gattctctggctccaagtctggcacgtcagccaccctgggcatcaccggactccagactggggacgaggccgattattactgcggaacatggga
tggcagcctgactggtgcagtgttcggcggagggaccaagctgaccgtcctaggt [SEQ ID NO: 125]
tctagaggtggtggtggtagcggcggcggcggctctggtggtggtggatccctcgagatggcc [SEQ ID NO: 305]
gaggtccagctggtgcagtctggggctgaggtgaagaagcctgggtcctcggtgaaggtctcatgcaaggcttctggaggcaccttcag
cagctatgctatcagctgggtgcgacaggcccctggacaagggcttgagtggatgggagggatcatccctatctttggtacagcaaacta
cgcacagaagttccagggcagagtcacgattaccgcggacgaatccacgagcacagcctacatggagctgagcagcctgagatctga
ggacacggccgtgtattactgtgcgcgcggttctgctctggaccattacgatcgttggggtcaaggtactctggtgaccgtctcctca
[SEQ ID NO: 126]
ACTAGTGGCCAGGCCGGCCAGCACCATCACCATCACCATGGCGCATACCCGTACGACGT
TCCGGACTACGCTTCT [SEQ ID NO: 306]
Amino Acid Sequence
(light chain variable region scFv linker heavy chain variable region His tag + HA tag)
QSVLTQPPSVSGAPGQRVTISCTGSTSNIGAGYDVHWYQQLPGTAPKLLINNNRNRPSGVPD
RFSGSKSGTSATLGITGLQTGDEADYYCGTWDGSLTGAVFGGGTKLTVLG [SEQ ID NO: 127]
SRGGGGSGGGGSGGGGSLEMA [SEQ ID NO: 307]
EVQLVQSGAEVKKPGSSVKVSCKASGGTFSSYAISWVRQAPGQGLEWMGGIIPIFGTA
NYAQKFQGRVTITADESTSTAYMELSSLRSEDTAVYYCARGSALDHYDRWGQGTLVT
VSS [SEQ ID NO: 128]
TSGQAGQHHHHHHGAYPYDVPDYAS [SEQ ID NO: 308]

TABLE 33
ET200-035

DNA Sequence
(light chain variable region scFv linker heavy chain variable region His tag + HA tag)
aattttatgctgactcagccccactctgtgtcggagtctccggggaagacggtaaccatctcctgcacccgcagcagtggcagcattgccagcaa
ctatgtgcagtggtaccagcagcgcccgggcagtgcccccaccactgtgatctatgaggataaccaaagaccctctggggtccctgatcggttct
ctggctccatcgacagctcctccaactctgcctccctcaccatctctggactgaagactgaggacgaggctgactactactgtcagtcttatgatag
caccaattgggtgttcggcggagggaccaagctgaccgtcctaggt [SEQ ID NO: 129]
tctagaggtggtggtggtagcggcggcggcggctctggtggtggtggatccctcgagatggcc [SEQ ID NO: 305]
caggtgcagctggtgcagtctggggctgaggtgaagaagcctgggtcctcggtgaaggtctcctgcaaggcttctggaggcaccttcag
cagctatgctatcagctgggtgcgacaggcccctggacaagggcttgagtggatgggagggatcatccctatctttggtacagcaaacta
cgcacagaagttccagggcagagtcacgattaccgcggacgaatccacgagcacagcctacatggagctgagcagcctgagatctga
ggacactgccgtgtattactgtgcgcgctacaactactacttcaacgattactggggtcaaggtactctggtgaccgtctcctca
[SEQ ID NO: 130]
ACTAGTGGCCAGGCCGGCCAGCACCATCACCATCACCATGGCGCATACCCGTACGACGT
TCCGGACTACGCTTCT [SEQ ID NO: 306]
Amino Acid Sequence
(light chain variable region scFv linker heavy chain variable region His tag + HA tag)
NFMLTQPHSVSESPGKTVTISCTRSSGSIASNYVQWYQQRPGSAPTTVIYEDNQRPSGVPDRF
SGSIDSSSNSASLTISGLKTEDEADYYCQSYDSTNWVFGGGTKLTVLG [SEQ ID NO: 131]
SRGGGGSGGGGSGGGGSLEMA [SEQ ID NO: 307]
QVQLVQSGAEVKKPGSSVKVSCKASGGTFSSYAISWVRQAPGQGLEWMGGIIPIFGTA
NYAQKFQGRVTITADESTSTAYMELSSLRSEDTAVYYCARYNYYFNDYWGQGTLVTV
SS [SEQ ID NO: 132]
TSGQAGQHHHHHHGAYPYDVPDYAS [SEQ ID NO: 308]

TABLE 34
ET200-037

DNA Sequence
(light chain variable region scFv linker heavy chain variable region His tag + HA tag)
tcctatgtgctgactcagccaccctcagtgtcagtggccccaggaaagacggccaggattacctgtgggggaaacaacattggaagtaaaagtg
tgcactggtaccagcagaagccaggccaggcccctgtgctggtcatctattatgatagcgaccggccctcagggatccctgagcgattctctggc
tccaactctgggaacacggccaccctgaccatcagcagggtcgaagccggggatgaggccgactattactgtcaggtgtgggatagtagtagtg
atcatccttatgtcttcggaactgggaccaaggtcaccgtcctaggt [SEQ ID NO: 133]
tctagaggtggtggtggtagcggcggcggcggctctggtggtggtggatccctcgagatggcc [SEQ ID NO: 305]
cagatgcagctggtgcagtctggagctgaggtgaagaagcctggggcctcagtgaaggtctcctgcaaggcttctggttacacctttacc
agctatggtatcagctgggtgcgacaggcccctggacaagggcttgagtggatgggatggatcagcgcttacaatggtaacacaaacta
tgcacagaagctccagggcagagtcaccatgaccacagacacatccacgagcacagcctacatggagctgaggagcctgagatctga
cgacactgccgtgtattactgtgcgcgctctatgttcggtgctcatgattcttggggtcaaggtactctggtgaccgtctcctca
[SEQ ID NO: 134]
ACTAGTGGCCAGGCCGGCCAGCACCATCACCATCACCATGGCGCATACCCGTACGACGT
TCCGGACTACGCTTCT [SEQ ID NO: 306]
Amino Acid Sequence
(light chain variable region scFv linker heavy chain variable region His tag + HA tag)
SYVLTQPPSVSVAPGKTARITCGGNNIGSKSVHWYQQKPGQAPVLVIYYDSDRPSGIPERFS
GSNSGNTATLTISRVEAGDEADYYCQVWDSSSDHPYVFGTGTKVTVLG [SEQ ID NO: 135]
SRGGGGSGGGGSGGGGSLEMA [SEQ ID NO: 307]
QMQLVQSGAEVKKPGASVKVSCKASGYTFTSYGISWVRQAPGQGLEWMGWISAYNG
NTNYAQKLQGRVTMTTDTSTSTAYMELRSLRSDDTAVYYCARSMFGAHDSWGQGTL
VTVSS [SEQ ID NO: 136]
TSGQAGQHHHHHHGAYPYDVPDYAS [SEQ ID NO: 308]

TABLE 35
ET200-038

DNA Sequence
(light chain variable region scFv linker heavy chain variable region His tag + HA tag)
cagtctgtgttgacgcagccgccctcagtgtctggggccccagggcagagggtcaccatctcctgcactgggagcagctccaacatcggggca
ggttttgatgtacactggtaccagctacttccaggaacagcccccaaactcctcatctatgctaacagcaatcggccctcaggggtccctgaccga
ttctctggctccaagtctggcacctcagcctccctggccatcactgggctcctggctgaggatgaggctgattattactgccagtcctatgacagca
gcctgagtggtgtggtattcggcggagggaccaagctgaccgtcctaggt [SEQ ID NO: 137]
tctagaggtggtggtggtagcggcggcggcggctctggtggtggtggatccctcgagatggcc [SEQ ID NO: 305]
caggtgcagctggtgcaatctggggctgaggtgaagaagcctgggtcctcggtgaaggtctcctgcaaggcttctggaggcaccttcag
cagctatgctatcagctgggtgcgacaggcccctggacaagggcttgagtggatgggagggatcatccctatctttggtacagcaaacta
cgcacagaagttccagggcagagtcacgattaccgcggacgaatccacgagcacagcctacatggagctgagcagcctgagatctga
ggacactgccgtgtattactgtgcgcgcggtgcttctttcgaccgtcatgataactggggtcaaggtactctggtgaccgtctcctca
[SEQ ID NO: 138]
ACTAGTGGCCAGGCCGGCCAGCACCATCACCATCACCATGGCGCATACCCGTACGACGT
TCCGGACTACGCTTCT [SEQ ID NO: 306]
Amino Acid Sequence
(light chain variable region scFv linker heavy chain variable region His tag + HA tag)
QSVLTQPPSVSGAPGQRVTISCTGSSSNIGAGFDVHWYQLLPGTAPKLLIYANSNRPSGVPD
RFSGSKSGTSASLAITGLLAEDEADYYCQSYDSSLSGVVFGGGTKLTVLG [SEQ ID NO: 139]
SRGGGGSGGGGSGGGGSLEMA [SEQ ID NO: 307]
QVQLVQSGAEVKKPGSSVKVSCKASGGTFSSYAISWVRQAPGQGLEWMGGIIPIFGTA
NYAQKFQGRVTITADESTSTAYMELSSLRSEDTAVYYCARGASFDRHDNWGQGTLVT
VSS [SEQ ID NO: 140]
TSGQAGQHHHHHHGAYPYDVPDYAS [SEQ ID NO: 308]

TABLE 36
ET200-039

DNA Sequence
(light chain variable region scFv linker heavy chain variable region His tag + HA tag)
aattttatgctgactcagccccactctgtgtcggagtctccggggaagacggtaaccatctcctgcacccgcagcagtggcagcattgccagcaa
ctatgtgcagtggtaccagcagcgcccgggcagttcccccaccactgtgatctatgaggataaccaaagaccctctggggtccctgatcggttct
ctggctccatcgacagctcctccaactctgcctccctcaccatctctggactgaagactgaggacgaggctgactactactgtcagtcttatgatag
cagcaattgggtgttcggcggagggaccaagctgaccgtcctaggt [SEQ ID NO: 141]
tctagaggtggtggtggtagcggcggcggcggctctggtggtggtggatccctcgagatggcc [SEQ ID NO: 305]
gaggtccagctggtgcagtctggggctgaggtgaagaagcctgggtcctcggtgaaggtctcctgcaaggcttctggaggcaccttcag
cagctatgctatcagctgggtgcgacaggcccctggacaagggcttgagtggatgggagggatcatccctatctttggtacagcaaacta
cgcacagaagttccagggcagagtcacgattaccgcggacgaatccacgagcacagcctacatggagctgagcagcctgagatctga
ggacacggccgtgtattactgtgcgcgctctaactactactacaacgattactggggtcaaggtactctggtgaccgtctcctca
[SEQ ID NO: 142]
ACTAGTGGCCAGGCCGGCCAGCACCATCACCATCACCATGGCGCATACCCGTACGACGT
TCCGGACTACGCTTCT [SEQ ID NO: 306]
Amino Acid Sequence
(light chain variable region scFv linker heavy chain variable region His tag + HA tag)
NFMLTQPHSVSESPGKTVTISCTRSSGSIASNYVQWYQQRPGSSPTTVIYEDNQRPSGVPDRF
SGSIDSSSNSASLTISGLKTEDEADYYCQSYDSSNWVFGGGTKLTVLG [SEQ ID NO: 143]
SRGGGGSGGGGSGGGGSLEMA [SEQ ID NO: 307]
EVQLVQSGAEVKKPGSSVKVSCKASGGTFSSYAISWVRQAPGQGLEWMGGIIPIFGTA
NYAQKFQGRVTITADESTSTAYMELSSLRSEDTAVYYCARSNYYYNDYWGQGTLVTVSS [SEQ ID NO: 144]
TSGQAGQHHHHHHGAYPYDVPDYAS [SEQ ID NO: 308]

TABLE 37
ET200-040

DNA Sequence
(light chain variable region scFv linker heavy chain variable region His tag + HA tag)
cagtctgtgttgacgcagccgccctcagtgtctggggccccagggcagagggtcaccatctcctgcactgggagcagctccaacatcggggca
ggttatgatgtacactggtaccagcagcttccaggaacagcccccaaactcctcatctatggtaacagcaatcggccctcaggggtccctgaccg
attctctggctccaagtctggcacctcagcctccctggccatcactgggctccaggctgaggatgaggctgattattactgccagtcctatgacagc
agcctgagtggttatgtcttcggaactgggaccaaggtcaccgtcctaggt [SEQ ID NO: 145]
tctagaggtggtggtggtagcggcggcggcggctctggtggtggtggatccctcgagatggcc [SEQ ID NO: 305]
caggtgcagctggtgcagtctggggctgaggtgaagaagcctggggcctcagtgaaggtctcctgcaaggtttccggatacaccctcac
tgaattatccatgcactgggtgcgacaggctcctggaaaagggcttgagtggatgggaggttttgatcctgaagatggtgaaacaatcta
cgcacagaagttccagggcagagtcaccatgaccgaggacacatctacagacacagcctacatggagctgagcagcctgagatctga
ggacactgccgtgtattactgtgcgcgctactctggtgtttactacgattggggtcaaggtactctggtgaccgtctcctca
[SEQ ID NO: 146]
ACTAGTGGCCAGGCCGGCCAGCACCATCACCATCACCATGGCGCATACCCGTACGACGT
TCCGGACTACGCTTCT [SEQ ID NO: 306]
Amino Acid Sequence
(light chain variable region scFv linker heavy chain variable region His tag + HA tag)
QSVLTQPPSVSGAPGQRVTISCTGSSSNIGAGYDVHWYQQLPGTAPKLLIYGNSNRPSGVPD
RFSGSKSGTSASLAITGLQAEDEADYYCQSYDSSLSGYVFGTGTKVTVLG [SEQ ID NO: 147]
SRGGGGSGGGGSGGGGSLEMA [SEQ ID NO: 307]
QVQLVQSGAEVKKPGASVKVSCKVSGYTLTELSMHWVRQAPGKGLEWMGGFDPED
GETIYAQKFQGRVTMTEDTSTDTAYMELSSLRSEDTAVYYCARYSGVYYDWGQGTLV
TVSS [SEQ ID NO: 148]
TSGQAGQHHHHHHGAYPYDVPDYAS [SEQ ID NO: 308]

TABLE 38
ET200-041

DNA Sequence
(light chain variable region scFv linker heavy chain variable region His tag + HA tag)
aattttatgctgactcagccccactctgtgtcggggtctccggggaagacggtaaccatctcctgcaccggcagcagtggcagcattgccgacaa
ctttgtgcagtggtaccagcagcgcccgggcggtgtccccaccactgtgatctttaatgatgacgaaagaccctctggcgtccctgatcggttctct
ggctccatcgacacctcctccaattctgcctccctcaccatctctggactgaagactgaggacgaggctgactactactgtcagtcttatgataataa
taatcgaggggtgttcggcggagggaccaagctgaccgtcctaggt [SEQ ID NO: 149]
tctagaggtggtggtggtagcggcggcggcggctctggtggtggtggatccctcgagatggcc [SEQ ID NO: 305]
caggtccagctggtgcagtctggggctgaggtgaagaagcctgggtcctcggtgaaggtctcctgcaaggcttctggaggcaccttcag
cagctatgctatcagctgggtgcgacaggcccctggacaagggcttgagtggatgggatggatgaaccctaacagtggtaacacaggc
tatgcacagaagttccagggcagagtcaccatgaccaggaacacctccataagcacagcctacatggagctgagcaacctgagatctg
aggacacggccgtgtattactgtgcgcgctactactcttacggttacgattggggtcaaggtactctggtgaccgtctcctca
[SEQ ID NO: 150]
ACTAGTGGCCAGGCCGGCCAGCACCATCACCATCACCATGGCGCATACCCGTACGACGT
TCCGGACTACGCTTCT [SEQ ID NO: 306]
Amino Acid Sequence
(light chain variable region scFv linker heavy chain variable region His tag + HA tag)
NFMLTQPHSVSGSPGKTVTISCTGSSGSIADNFVQWYQQRPGGVPTTVIFNDDERPSGVPDR
FSGSIDTSSNSASLTISGLKTEDEADYYCQSYDNNNRGVFGGGTKLTVLG [SEQ ID NO: 151]
SRGGGGSGGGGSGGGGSLEMA [SEQ ID NO: 307]
QVQLVQSGAEVKKPGSSVKVSCKASGGTFSSYAISWVRQAPGQGLEWMGWMNPNSG
NTGYAQKFQGRVTMTRNTSISTAYMELSNLRSEDTAVYYCARYYSYGYDWGQGTLVT
VSS [SEQ ID NO: 152]
TSGQAGQHHHHHHGAYPYDVPDYAS [SEQ ID NO: 308]

TABLE 39
ET200-042

DNA Sequence
(light chain variable region scFv linker heavy chain variable region His tag + HA tag)
cagtctgtcgtgacgcagccgccctcagtgtctggggccccagggcagacggtcaccatctcctgcactgggggcagctccaacatcgggaca
ggttattttgtaaattggtaccagcaggttccaggaaaagcccccaaactcctcatcctgggtaacaataatcggccctcgggggtccctgaccga
ctctccggctccacgtccggcacctcagcctccctggccatcactgggctccaggctgaggatgagggtacttattactgccagtcctatgacagc
agcctgagtggttatgtcttcggaactgggaccaaggtcaccgtcctaggt [SEQ ID NO: 153]
tctagaggtggtggtggtagcggcggcggcggctctggtggtggtggatccctcgagatggcc [SEQ ID NO: 305]
caggtacagctgcagcagtcaggtccaggactggtgaagccctcgcagaccctctcactcacctgtggcatctccggggacagtgtctct
accaacagtgttgcttggcactggatcaggcagtccccatcgagaggccttgagtggctgggaaggacatactacaggtccaagtggtc
taatgactatggagtatctgtgaaaagtcgaatcaccatcatcccagacacatccaagaaccagttctccctgcagctgaactctgtgact
cccgaggacacggctgtgtattactgtgcgcgctcttcttcttggtaccagatcttcgattactggggtcaaggtactctggtgaccgtctcc
tca [SEQ ID NO: 154]
ACTAGTGGCCAGGCCGGCCAGCACCATCACCATCACCATGGCGCATACCCGTACGACGT
TCCGGACTACGCTTCT [SEQ ID NO: 306]
Amino Acid Sequence
(light chain variable region scFv linker heavy chain variable region His tag + HA tag)
QSVVTQPPSVSGAPGQTVTISCTGGSSNIGTGYFVNWYQQVPGKAPKLLILGNNNRPSGVPD
RLSGSTSGTSASLAITGLQAEDEGTYYCQSYDSSLSGYVFGTGTKVTVLG [SEQ ID NO: 155]
SRGGGGSGGGGSGGGGSLEMA [SEQ ID NO: 307]
QVQLQQSGPGLVKPSQTLSLTCGISGDSVSTNSVAWHWIRQSPSRGLEWLGRTYYRSK
WSNDYGVSVKSRITIIPDTSKNQFSLQLNSVTPEDTAVYYCARSSSWYQIFDYWGQGTL
VTVSS [SEQ ID NO: 156]
TSGQAGQHHHHHHGAYPYDVPDYAS [SEQ ID NO: 308]

TABLE 40
ET200-043

DNA Sequence
(light chain variable region scFv linker heavy chain variable region His tag + HA tag)
aattttatgctgactcagccccactctgtgtcggagtctccggggaagacggtaaccatctcctgcaccggcagcagcgacagcatagccaacaa
ctatgttcagtggtaccagcagcgcccgggcagtgcccccaccaatgtgatctacgaagatgtccaaagaccctctggggtccctgatcggttct
ctgggtccatcgacagctcctccaactctgcctccctcaccatctctggactgaagactgaggacgaggctgtctactattgtcagtcttatcatagc
gacaatcgttgggtgttcggcggcgggaccaagctgaccgtcctaggt [SEQ ID NO: 157]
tctagaggtggtggtggtagcggcggcggcggctctggtggtggtggatccctcgagatggcc [SEQ ID NO: 305]
caggtgcagctggtggagtctgggggaggcttggtacagcctggggggtccctgagactctcctgtgcagcctctggattcacctttagc
agctatgccatgagctgggtccgccaggctccagggaaggggctggagtgggtctcagctattagtggtagtggtggtagcacatacta
cgcagactccgtgaagggccggttcaccatctccagagacaattccaagaacacgctgtatctgcaaatgaacagcctgagagccgag
gacacggccgtatattactgtgcgcgctctggtgcttactgggactactctgtttacgatgaatggggtcaaggtactctggtgaccgtctc
ctca [SEQ ID NO: 158]
ACTAGTGGCCAGGCCGGCCAGCACCATCACCATCACCATGGCGCATACCCGTACGACGT
TCCGGACTACGCTTCT [SEQ ID NO: 306]
Amino Acid Sequence
(light chain variable region scFv linker heavy chain variable region His tag + HA tag)
NFMLTQPHSVSESPGKTVTISCTGSSDSIANNYVQWYQQRPGSAPTNVIYEDVQRPSGVPDR
FSGSIDSSSNSASLTISGLKTEDEAVYYCQSYHSDNRWVFGGGTKLTVLG [SEQ ID NO: 159]
SRGGGGSGGGGSGGGGSLEMA [SEQ ID NO: 307]
QVQLVESGGGLVQPGGSLRLSCAASGFTFSSYAMSWVRQAPGKGLEWVSAISGSGGST
YYADSVKGRFTISRDNSKNTLYLQMNSLRAEDTAVYYCARSGAYWDYSVYDEWGQGT
LVTVSS [SEQ ID NO: 160]
TSGQAGQHHHHHHGAYPYDVPDYAS [SEQ ID NO: 308]

TABLE 41
ET200-044

DNA Sequence
(light chain variable region scFv linker heavy chain variable region His tag + HA tag)
cagtctgtgttgactcagccaccctcagtgtccgtgtccccaggacagacagccaccatcgcctgttctggacataaattggggg
ataaatatgcttcctggtatcagcagaagtcgggccagtcccctgtgttgatcatctatcaggataataagcggccctcagggattc
ctgagcgattctctggctccaactctgggaacacagccactctgaccatcagcgggacccaggctctggatgaggctgactatta
ttgtcaggcgtgggacagtagtacttatgtggcattcggcggagggaccaagctgaccgtcctaggt [SEQ ID NO:
161]
tctagaggtggtggtggtagcggcggcggcggctctggtggtggtggatccctcgagatggcc [SEQ ID NO: 305]
caggtgcagctgcaggagtccggcccaggactggtgaagccttcggagaccctgtccctcacctgcgttgtctctggtgg
ctccatcagcagtagtaactggtggagctgggtccgccagcccccagggaaggggctggagtggattggggaaatctat
catagtgggagccccaactacaacccatccctcaagagtcgagtcaccatatcagtagacaagtccaagaaccagttct
ccctgaagctgagctctgtgaccgccgcggacacggccgtgtattactgtgcgcgcatgactactcatactttcggttacg
atgcttggggtcaaggtactctggtgaccgtctcctca [SEQ ID NO: 162]
ACTAGTGGCCAGGCCGGCCAGCACCATCACCATCACCATGGCGCATACCCGT
ACGACGTTCCGGACTACGCTTCT [SEQ ID NO: 306]
Amino Acid Sequence
(light chain variable region scFv linker heavy chain variable region His tag + HA tag)
QSVLTQPPSVSVSPGQTATIACSGHKLGDKYASWYQQKSGQSPVLIIYQDNKRPS
GIPERFSGSNSGNTATLTISGTQALDEADYYCQAWDSSTYVAFGGGTKLTVLG
[SEQ ID NO: 163]
SRGGGGSGGGGSGGGGSLEMA [SEQ ID NO: 307]
QVQLQESGPGLVKPSETLSLTCVVSGGSISSSNWWSWVRQPPGKGLEWIGEI
YHSGSPNYNPSLKSRVTISVDKSKNQFSLKLSSVTAADTAVYYCARMTTHTF
GYDAWGQGTLVTVSS [SEQ ID NO: 164]
TSGQAGQHHHHHHGAYPYDVPDYAS [SEQ ID NO: 308]

TABLE 42
ET200-045

DNA Sequence
(light chain variable region scFv linker heavy chain variable region His tag + HA tag)
cagcctgtgctgactcagccaccctcagtgtcagtggccccaggaaagacggccacgattacttgtgggggaaacaacattgg
aagtgaaagtgtgcactggtaccaccagaagccaggccaggcccctgtgttggtcatctatgatgatgccggccggccctcag
ggatccctgagcgattcactggctccaactctgggaacacggccaccctgaccatcagcagggtcgaagccggggatgaggc
cgactattactgtcaggtgtgggacagaaatagtgctcagtttgtcttcggacctgggaccaaggtcaccgtcctaggt [SEQ
ID NO: 165]
tctagaggtggtggtggtagcggcggcggcggctctggtggtggtggatccctcgagatggcc [SEQ ID NO: 305]
gaggtccagctggtgcagtctggagctgaggtgaagaagcctggggcctcagtgaaggtctcctgcaaggcttctggtt
acacctttaccagctatggtatcagctgggtgcgacaggcccctggacaagggcttgagtggatgggatggatcagcgc
ttacaatggtaacacaaactatgcacagaagctccagggcagagtcaccatgaccacagacacatccacgagcacagc
ctacatggagctgaggagcctgagatctgacgacacggccgtgtattactgtgcgcgcggtgttcatctggattggtggg
gtcaaggtactctggtgaccgtctcctca [SEQ ID NO: 166]
ACTAGTGGCCAGGCCGGCCAGCACCATCACCATCACCATGGCGCATACCCGT
ACGACGTTCCGGACTACGCTTCT [SEQ ID NO: 306]
Amino Acid Sequence
(light chain variable region scFv linker heavy chain variable region His tag + HA tag)
QPVLTQPPSVSVAPGKTATITCGGNNIGSESVHWYHQKPGQAPVLVIYDDAGRPS
GIPERFTGSNSGNTATLTISRVEAGDEADYYCQVWDRNSAQFVFGPGTKVTVLG
[SEQ ID NO: 167]
SRGGGGSGGGGSGGGGSLEMA [SEQ ID NO: 307]
EVQLVQSGAEVKKPGASVKVSCKASGYTFTSYGISWVRQAPGQGLEWMGW
ISAYNGNTNYAQKLQGRVTMTTDTSTSTAYMELRSLRSDDTAVYYCARGVH
LDWWGQGTLVTVSS [SEQ ID NO: 168]
TSGQAGQHHHHHHGAYPYDVPDYAS [SEQ ID NO: 308]

TABLE 43
ET200-069

DNA Sequence
(light chain variable region scFv linker heavy chain variable region His tag + HA tag)
cagtctgtcgtgacgcagccaccctcagcgtctgggacccccgggcagagggtcaccatctcttgttctggaagcagctccaac
atcggaagtaattatgtatactggtaccagcagctcccaggaacggcccccaaactcctcatctatagtaataatcagcggccctc
aggggtccctgaccgattctctggctccaagtctggcacctcagcctccctggccatcagtgggctccggtccgaggatgaggc
tgattattactgtgcagcatgggatgacagcctgagtggttatgtcttcggaactgggaccaagctgaccgtcctaggt [SEQ
ID NO: 169]
tctagaggtggtggtggtagcggcggcggcggctctggtggtggtggatccctcgagatggcc [SEQ ID NO: 305]
caggtgcagctacagcagtggggcgcaggactgttgaagccttcggagaccctgtccctcacctgcgctgtctatggtgg
gtccttcagtggttactactggagctggatccgccagcccccagggaaggggctggagtggattggggaaatcaatcat
agtggaagcaccaactacaacccgtccctcaagagtcgagtcaccatatcagtagacacgtccaagaaccagttctccc
tgaagctgagctctgtgaccgccgcggacacggccgtgtattactgtgcgcgcctgtacgaaggtggttaccatggttgg
ggttcttggctgtcttctgattcttggggtcaaggtactctggtgaccgtctcctca [SEQ ID NO: 170]
ACTAGTGGCCAGGCCGGCCAGCACCATCACCATCACCATGGCGCATACCCGT
ACGACGTTCCGGACTACGCTTCT [SEQ ID NO: 306]
Amino Acid Sequence
(light chain variable region scFv linker heavy chain variable region His tag + HA tag)
QSVVTQPPSASGTPGQRVTISCSGSSSNIGSNYVYWYQQLPGTAPKLLIYSNNQRP
SGVPDRFSGSKSGTSASLAISGLRSEDEADYYCAAWDDSLSGYVFGTGTKLTVL
G [SEQ ID NO: 171]
SRGGGGSGGGGSGGGGSLEMA [SEQ ID NO: 307]
QVQLQQWGAGLLKPSETLSLTCAVYGGSFSGYYWSWIRQPPGKGLEWIGEI
NHSGSTNYNPSLKSRVTISVDTSKNQFSLKLSSVTAADTAVYYCARLYEGGY
HGWGSWLSSDSWGQGTLVTVSS [SEQ ID NO: 172]
TSGQAGQHHHHHHGAYPYDVPDYAS [SEQ ID NO: 308]

TABLE 44
ET200-078

DNA Sequence
(light chain variable region scFv linker heavy chain variable region His tag + HA tag)
cagtctgtgttgactcagccaccctcagcgtctgggacccccgggcagagggtcaccatctcttgttctggaagcagctccaaca
tcggaagtaatactgtaaactggtaccagcagctcccaggaacggcccccaaactcctcatctatagtaataatcagcggccctc
aggggtccctgaccgattctctggctccaagtctggcacctcagcctccctggccatcagtgggctccagtctgaggatgaggct
gattattactgtgcagcatgggatgacagcctgaatggttattgggtgttcggcggagggaccaagctgaccgtcctaggt
[SEQ ID NO: 173]
tctagaggtggtggtggtagcggcggcggcggctctggtggtggtggatccctcgagatggcc [SEQ ID NO: 305]
caggtgcagctacagcagtggggcgcaggactgttgaagccttcggagaccctgtccctcacctgcgctgtctatggtgg
gtccttcagtggttactactggagctggatccgccagcccccagggaaggggctggagtggattggggaaatcaatcat
agtggaagcaccaactacaacccgtccctcaagagtcgagtcaccatatcagtagacacgtccaagaaccagttctccc
tgaagctgagctctgtgaccgccgcggacacggctgtgtattactgtgcgcgcgaaggggcatttgatgcttttgatatct
ggggccaagggacaatggtcaccgtctcttca [SEQ ID NO: 174]
ACTAGTGGCCAGGCCGGCCAGCACCATCACCATCACCATGGCGCATACCCGT
ACGACGTTCCGGACTACGCTTCT [SEQ ID NO: 306]
Amino Acid Sequence
(light chain variable region scFv linker heavy chain variable region His tag + HA tag)
QSVLTQPPSASGTPGQRVTISCSGSSSNIGSNTVNWYQQLPGTAPKLLIYSNNQRP
SGVPDRFSGSKSGTSASLAISGLQSEDEADYYCAAWDDSLNGYWVFGGGTKLTV
LG [SEQ ID NO: 175]
SRGGGGSGGGGSGGGGSLEMA [SEQ ID NO: 307]
QVQLQQWGAGLLKPSETLSLTCAVYGGSFSGYYWSWIRQPPGKGLEWIGEINHS
GSTNYNPSLKSRVTISVDTSKNQFSLKLSSVTAADTAVYYCAREGAFDAFDIWG
QGTMVTVS [SEQ ID NO: 176]
TSGQAGQHHHHHHGAYPYDVPDYAS [SEQ ID NO: 308]

TABLE 45
ET200-079

DNA Sequence
(light chain variable region scFv linker heavy chain variable region His tag + HA tag)
tcctatgagctgactcagccaccctcagcgtctgggacccccgggcagagggtcaccatctcttgttctggaagcagctccaac
atcggaagtaattatgtatactggtaccagcagctcccaggaacggcccccaaactcttcatctataggaataatcagcggccctc
aggggtccctgaccgattctctggctccaagtctggcacctcagcctccctggccatcagtgggctccggtccgaggatgaggc
tgattattactgtgcagcatgggatgacagcctgagtggttatctcttcggaactgggaccaaggtcaccgtcctaggt [SEQ
ID NO: 177]
tctagaggtggtggtggtagcggcggcggcggctctggtggtggtggatccctcgagatggcc [SEQ ID NO: 305]
gaggtgcagctggtggagtctgggggaggcttggtacagcctggcaggtccctgagactctcctgtgcagcctctggatt
cacctttgatgattatgccatgcactgggtccggcaagctccagggaagggcctggagtgggtctcaggtattagttgga
atagtggtagcataggctatgcggactctgtgaagggccgattcaccatctccagagacaacgccaagaactccctgtat
ctgcaaatgaacagtctgagagctgaggacacggccttgtattactgtgcaaatggcgactccaactactactacggtat
ggacgtctggggccaagggaccacggtcaccgtctcctca [SEQ ID NO: 178]
ACTAGTGGCCAGGCCGGCCAGCACCATCACCATCACCATGGCGCATACCCGT
ACGACGTTCCGGACTACGCTTCT [SEQ ID NO: 306]
Amino Acid Sequence
(light chain variable region scFv linker heavy chain variable region His tag + HA tag)
SYELTQPPSASGTPGQRVTISCSGSSSNIGSNYVYWYQQLPGTAPKLFIYRNNQRP
SGVPDRFSGSKSGTSASLAISGLRSEDEADYYCAAWDDSLSGYLFGTGTKVTVL
G [SEQ ID NO: 179]
SRGGGGSGGGGSGGGGSLEMA [SEQ ID NO: 307]
EVQLVESGGGLVQPGRSLRLSCAASGFTFDDYAMHWVRQAPGKGLEWVSG
ISWNSGSIGYADSVKGRFTISRDNAKNSLYLQMNSLRAEDTALYYCANGDSN
YYYGMDVWGQGTTVTVSS [SEQ ID NO: 180]
TSGQAGQHHHHHHGAYPYDVPDYAS [SEQ ID NO: 308]

TABLE 46
ET200-081

DNA Sequence
(light chain variable region scFv linker heavy chain variable region His tag + HA tag)
cagtctgccctgactcagcctgcctccgtgtccgggtctcctggacagtcgatcaccatctcctgcactggaaccagcagtgaca
ttggtggttataactatgtctcctggtaccaacaacacccaggcaaagcccccaaactcatgatttatgatgtcagtaatcggccct
caggggtttctaatcgcttctctggctccaagtctggcaacacggcctccctgaccatctctgggctccaggctgaggacgaggc
tgattattactgcatctcatatacacgcacctggaacccctatgtcttcgggagtgggaccaaggtcaccgtcctaggt [SEQ
ID NO: 181]
tctagaggtggtggtggtagcggcggcggcggctctggtggtggtggatccctcgagatggcc [SEQ ID NO: 305]
gaggtgcagctggtgcagtctgggggaggcgtggtacagcctggggggtccctgagactctcctgtgcagcctctggatt
cacctttgatgattatgccatgcactgggtccgtcaagctccagggaagggtctggagtgggtctctcttattagtgggga
tggtggtagcacatactatgcagactctgtgaagggccgattcaccatctccagagacaacagcaaaaactccctgtatc
tgcaaatgaacagtctgagaactgaggacaccgccttgtattactgtgcaaaagatcgggcagcagctggctactacta
ctacggtatggacgtctggggccaagggaccacggtcaccgtctcctca [SEQ ID NO: 182]
ACTAGTGGCCAGGCCGGCCAGCACCATCACCATCACCATGGCGCATACCCGT
ACGACGTTCCGGACTACGCTTCT [SEQ ID NO: 306]
Amino Acid Sequence
(light chain variable region scFv linker heavy chain variable region His tag + HA tag)
QSALTQPASVSGSPGQSITISCTGTSSDIGGYNYVSWYQQHPGKAPKLMIYDVSN
RPSGVSNRFSGSKSGNTASLTISGLQAEDEADYYCISYTRTWNPYVFGSGTKVTV
LG [SEQ ID NO: 183]
SRGGGGSGGGGSGGGGSLEMA [SEQ ID NO: 307]
EVQLVQSGGGVVQPGGSLRLSCAASGFTFDDYAMHWVRQAPGKGLEWVSL
ISGDGGSTYYADSVKGRFTISRDNSKNSLYLQMNSLRTEDTALYYCAKDRAA
AGYYYYGMDVWGQGTTVTVSS [SEQ ID NO: 184]
TSGQAGQHHHHHHGAYPYDVPDYAS [SEQ ID NO: 308]

TABLE 47
ET200-097

DNA Sequence
(light chain variable region scFv linker heavy chain variable region His tag + HA tag)
ctgcctgtgctgactcagccaccctcagtgtccgtgtccccaggacagacagccatcatcacctgctctggagataaattggggg
aaaaatatgtttcctggtatcagcagaagccaggccagtcccctgtactggtcatcgatcaagataccaggaggccctcagggat
ccctgagcgattctctggctccaactctgggaccacagccactctgaccatcagcgggacccaggctatggatgaggctgacta
ttactgtcaggcgtgggacaggggtgtggtattcggcggagggaccaagctgaccgtcctaggt [SEQ ID NO: 185]
tctagaggtggtggtggtagcggcggcggcggctctggtggtggtggatccctcgagatggcc [SEQ ID NO: 305]
gaggtgcagctggtggagtctgggggagacttggtacagcctggcaggtccctgagactctcctgtgcagcctctggatt
cacctttaatgattatgccatgcactgggtccggcaagctccagggaagggcctggagtgggtctcaggtattagttgga
gtggtaataacataggctatgcggactctgtgaagggccgattcaccatctccagagacaacgccaagaactccctgtat
ctgcaaatgaacagtctgagagctgaggacacggccttgtattactgtgcaaaagatagtatacggtatggcatcacctg
gggaggttttgactactggggccagggaaccctggtcaccgtctcctca [SEQ ID NO: 186]
ACTAGTGGCCAGGCCGGCCAGCACCATCACCATCACCATGGCGCATACCCGT
ACGACGTTCCGGACTACGCTTCT [SEQ ID NO: 306]
Amino Acid Sequence
(light chain variable region scFv linker heavy chain variable region His tag + HA tag)
LPVLTQPPSVSVSPGQTAIITCSGDKLGEKYVSWYQQKPGQSPVLVIDQDTRRPS
GIPERFSGSNSGTTATLTISGTQAMDEADYYCQAWDRGVVFGGGTKLTVLG
[SEQ ID NO: 187]
SRGGGGSGGGGSGGGGSLEMA [SEQ ID NO: 307]
EVQLVESGGDLVQPGRSLRLSCAASGFTFNDYAMHWVRQAPGKGLEWVSG
ISWSGNNIGYADSVKGRFTISRDNAKNSLYLQMNSLRAEDTALYYCAKDSIR
YGITWGGFDYWGQGTLVTVSS [SEQ ID NO: 188]
TSGQAGQHHHHHHGAYPYDVPDYAS [SEQ ID NO: 308]

TABLE 48
ET200-098

DNA Sequence
(light chain variable region scFv linker heavy chain variable region His tag + HA tag)
cagcctgtgctgactcagccaccctcggtgtccaagggcttgagacagaccgccacactcacctgcactgggaacagcaacaa
tgttggcaacctaggagtagcttggctgcagcagcaccagggccaccctcccaaactcctatcctacaggaataacaaccggc
cctcagggatctcagagagattatctgcatccaggtcaggaaacacagcctccctgaccattactggactccagcctgaggacg
aggctgactattactgctcagcatgggacagtagcctcagtgcttgggtgttcggcggagggaccaagctgaccgtcctaggt
[SEQ ID NO: 189]
tctagaggtggtggtggtagcggcggcggcggctctggtggtggtggatccctcgagatggcc [SEQ ID NO: 305]
gaggtgcagctggtggagtctgggggagtcgtggtacagcctggggggtccctgagactctcctgtgcagcctctggatt
cacctttgatgattatgccatgcactgggtccgtcaagctccggggaagggtctggagtgggtctctcttattaattgggat
ggtggtagcacctactatgcagactctgtgaagggtcgattcaccatctccagagacaacagcaaaaactccctgtatct
gcaaatgaacagtctgagagctgaggacaccgccttgtattactgtgcaaaagggatgggcctgagggcgtttgactac
tggggccagggaaccctggtcaccgtctcctca [SEQ ID NO: 190]
ACTAGTGGCCAGGCCGGCCAGCACCATCACCATCACCATGGCGCATACCCGT
ACGACGTTCCGGACTACGCTTCT [SEQ ID NO: 306]
Amino Acid Sequence
(light chain variable region scFv linker heavy chain variable region His tag + HA tag)
QPVLTQPPSVSKGLRQTATLTCTGNSNNVGNLGVAWLQQHQGHPPKLLSYRNN
NRPSGISERLSASRSGNTASLTITGLQPEDEADYYCSAWDSSLSAWVFGGGTKLT
VLG [SEQ ID NO: 191]
SRGGGGSGGGGSGGGGSLEMA [SEQ ID NO: 307]
EVQLVESGGVVVQPGGSLRLSCAASGFTFDDYAMHWVRQAPGKGLEWVSL
INWDGGSTYYADSVKGRFTISRDNSKNSLYLQMNSLRAEDTALYYCAKGMG
LRAFDYWGQGTLVTVSS [SEQ ID NO: 192]
TSGQAGQHHHHHHGAYPYDVPDYAS [SEQ ID NO: 308]

TABLE 49
ET200-099

DNA Sequence
(light chain variable region scFv linker heavy chain variable region His tag + HA tag)
cagtctgtgttgactcagccaccctcagcgtctgggacccccgggcagagggtcaccatctcctgttctggaagcagctccaac
atcggaagtaatactgtaaactggtaccagcagctcccaggaacggcccccaaactcctcatctatagtaatgatcagcggccct
caggggtccctgaccgattctctggctccaagtccggcacctcagcctccctggccatcagtgggctccagtctgaggatgagg
ctgattattactgtgcttcatgggatgacagcctgaatggccgttatgtcttcggaactgggaccaaggtcaccgtcctaggt
[SEQ ID NO: 193]
tctagaggtggtggtggtagcggcggcggcggctctggtggtggtggatccctcgagatggcc [SEQ ID NO: 305]
caggtccagctggtacagtctggggctgaggtgaggaagcctggggcctcagtgaaggtttcctgcaagacttctggat
acaccttcagttggtatgctatacattgggtgcgccaggcccccggacaaaggcttgagtggatgggatggatcaacgct
ggcaatggaaacacaaaatattcacagaaatttcagggcagagtcagtcttaccagggacacatccgcgagcacagcc
tacatggagctgagcagcctgagatctgatgacacggctgtgtattactgtgcgagacccgataattatggttcgggtgg
ggatgtttttgatatctggggccaagggacaatggtcaccgtctcttca [SEQ ID NO: 194]
ACTAGTGGCCAGGCCGGCCAGCACCATCACCATCACCATGGCGCATACCCGT
ACGACGTTCCGGACTACGCTTCT [SEQ ID NO: 306]
Amino Acid Sequence
(light chain variable region scFv linker heavy chain variable region His tag + HA tag)
QSVLTQPPSASGTPGQRVTISCSGSSSNIGSNTVNWYQQLPGTAPKLLIYSNDQRP
SGVPDRFSGSKSGTSASLAISGLQSEDEADYYCASWDDSLNGRYVFGTGTKVTV
LG [SEQ ID NO: 195]
SRGGGGSGGGGSGGGGSLEMA [SEQ ID NO: 307]
QVQLVQSGAEVRKPGASVKVSCKTSGYTFSWYAIHWVRQAPGQRLEWMG
WINAGNGNTKYSQKFQGRVSLTRDTSASTAYMELSSLRSDDTAVYYCARPD
NYGSGGDVFDIWGQGTMVTVSS [SEQ ID NO: 196]
TSGQAGQHHHHHHGAYPYDVPDYAS [SEQ ID NO: 308]

TABLE 50
ET200-100

DNA Sequence
(light chain variable region scFv linker heavy chain variable region His tag + HA tag)
aattttatgctgactcagccccactctgtgtcggagtctccggggaagacggtaaccatctcctgcacccgcagcagtggcagca
ttgccagcaactttgtgcagtggtaccagcagcgcccgggcagtgcccccacccctatgatctatgaggataacaacagacccc
ctggggtccctgatcggttctctgcctccgtcgacagctcctccaactctgcctccctcaccatctctggactgaagactgaggac
gaggctgactactactgtcagtcttatgataccagcaatgtggtattcggcggggggaccaagctgaccgtcctaggt [SEQ
ID NO: 197]
tctagaggtggtggtggtagcggcggcggcggctctggtggtggtggatccctcgagatggcc [SEQ ID NO: 305]
gaggtgcagctggtggagtctgggggaggcttggtacagcctggagggtccctgagactctcctgtgcagcctctggatt
caccttcagtagttatgaaatgaactgggtccgccaggctccagggaaggggctggagtgggtttcatacattagtagta
gtggtagtaccatatactacgcagactctgtgaagggccgattcaccatctccagagacaacgccaagaactcactgtat
ctgcaaatgaacagcctgagagccgaggacacggctgtttattactgtgcacgctgggactacggtatggacgtctggg
gccaagggaccacggtcaccgtctcctca [SEQ ID NO: 198]
ACTAGTGGCCAGGCCGGCCAGCACCATCACCATCACCATGGCGCATACCCGT
ACGACGTTCCGGACTACGCTTCT [SEQ ID NO: 306]
Amino Acid Sequence
(light chain variable region scFv linker heavy chain variable region His tag + HA tag)
NFMLTQPHSVSESPGKTVTISCTRSSGSIASNFVQWYQQRPGSAPTPMIYEDNNRP
PGVPDRFSASVDSSSNSASLTISGLKTEDEADYYCQSYDTSNVVFGGGTKLTVLG
[SEQ ID NO: 199]
SRGGGGSGGGGSGGGGSLEMA [SEQ ID NO: 307]
EVQLVESGGGLVQPGGSLRLSCAASGFTFSSYEMNWVRQAPGKGLEWVSYI
SSSGSTIYYADSVKGRFTISRDNAKNSLYLQMNSLRAEDTAVYYCARWDYG
MDVWGQGTTVTVSS [SEQ ID NO: 200]
TSGQAGQHHHHHHGAYPYDVPDYAS [SEQ ID NO: 308]

TABLE 51
ET200-101

DNA Sequence
(light chain variable region scFv linker heavy chain variable region His tag +
HA tag)
caggctgtgctgactcagccaccctcagcgtctggggcccccgggcagagggtcaccgtctcttgttctggaagcaactccaac
atcggaagtaactacgttaactggtaccagcagttcccaggaacggcccccaaactcctcatgtatagtagtagtcagcggccct
caggggtccctgaccgattctctggctccaagtctggcacctcagcctccctggccatcagtgggctccactctgaggatgagg
ctgattattactgtgctacatgggatgacagcctgaatgcttgggtgttcggcggagggaccaagctgaccgtcctaggt [SEQ
ID NO: 201]
tctagaggtggtggtggtagcggcggcggcggctctggtggtggtggatccctcgagatggcc [SEQ ID NO: 305]
gaggtccagctggtgcagtctggggctgaggtgaggaagcctggggcctcagtgaaggtttcctgcaagacttctggat
acaccttcacttggtatgctatacattgggtgcgccaggcccccggacaaaggcttgagtggatgggatggatcaacgct
ggcagtggaaacacaaaatattcacagaaatttcagggcagagtcacccttaccagggacacatccgcgagcacagcg
tacatggagctgagcagcctgagatctgatgacacggctgtgtattactgtgcgagacccaataactatggttcgggtgg
ggatgtttttgatatctggggccaagggacaatggtcaccgtctcttca [SEQ ID NO: 202]
ACTAGTGGCCAGGCCGGCCAGCACCATCACCATCACCATGGCGCATACCCGT
ACGACGTTCCGGACTACGCTTCT [SEQ ID NO: 306]
Amino Acid Sequence
(light chain variable region scFv linker heavy
chain variable region His tag + HA tag)
QAVLTQPPSASGAPGQRVTVSCSGSNSNIGSNYVNWYQQFPGTAPKLLMYSSSQ
RPSGVPDRFSGSKSGTSASLAISGLHSEDEADYYCATWDDSLNAWVFGGGTKLT
VLG [SEQ ID NO: 203]
SRGGGGSGGGGSGGGGSLEMA [SEQ ID NO: 307]
EVQLVQSGAEVRKPGASVKVSCKTSGYTFTWYAIHWVRQAPGQRLEWMG
WINAGSGNTKYSQKFQGRVTLTRDTSASTAYMELSSLRSDDTAVYYCARPN
NYGSGGDVFDIWGQGTMVTVSS [SEQ ID NO: 204]
TSGQAGQHHHHHHGAYPYDVPDYAS [SEQ ID NO: 308]

TABLE 52
ET200-102

DNA Sequence
(light chain variable region scFv linker heavy chain variable region His tag +
HA tag)
cagtctgtcgtgacgcagccgccctcagtgtctgcggccccaggacagaaggtcaccatctcctgctctggaagcagctccaa
cattgggaataattatgtatcctggtaccagcagctcccaggaacagcccccaaactcctcatttatgacaataataagcgaccct
cagggattcctgaccgattctctggctccaagtctggcacgtcagccaccctgggcatcaccggactccagactggggacgag
gccgattattactgcggaacatgggatagcagcctgagtgcttatgtcttcggaactgggaccaaggtcaccgtcctaggt
[SEQ ID NO: 205]
tctagaggtggtggtggtagcggcggcggcggctctggtggtggtggatccctcgagatggcc [SEQ ID NO: 305]
caggtccagctggtgcagtctggggctgaggtgaagaagcctggggcctcagtgaaagtttcctgcaaggcttctggat
acaccttcacgaactatgctctgcattgggtgcgccaggcccccggacaagggcttgagtggatggcatggatcaacgg
tggcaatggtaacacaaaatattcacagaacttccagggcagagtcaccattaccagggacacatccgcgagcacagc
ctatatggagctgagcagcctgagatctgaagacacggctgtgtattactgtgcgaaaccggaggaaacagctggaac
aatccactttgactactggggccagggaaccccggtcaccgtctcctca [SEQ ID NO: 206]
ACTAGTGGCCAGGCCGGCCAGCACCATCACCATCACCATGGCGCATACCCGT
ACGACGTTCCGGACTACGCTTCT [SEQ ID NO: 306]
Amino Acid Sequence
(light chain variable region scFv linker heavy
chain variable region His tag + HA tag)
QSVVTQPPSVSAAPGQKVTISCSGSSSNIGNNYVSWYQQLPGTAPKLLIYDNNKR
PSGIPDRFSGSKSGTSATLGITGLQTGDEADYYCGTWDSSLSAYVFGTGTKVTVL
G [SEQ ID NO: 207]
SRGGGGSGGGGSGGGGSLEMA [SEQ ID NO: 307]
QVQLVQSGAEVKKPGASVKVSCKASGYTFTNYALHWVRQAPGQGLEWMA
WINGGNGNTKYSQNFQGRVTITRDTSASTAYMELSSLRSEDTAVYYCAKPEE
TAGTIHFDYWGQGTPVTVSS [SEQ ID NO: 208]
TSGQAGQHHHHHHGAYPYDVPDYAS [SEQ ID NO: 308]

TABLE 53
ET200-103

DNA Sequence
(light chain variable region scFv linker heavy chain variable region His tag +
HA tag)
caggctgtgctgactcagccccactctgtgtcggagtctccggggaagacggtaaccatctcctgcacccgcagcagtggcag
cattgccagcaactatgtgcagtggtaccagcagcgcccgggcagtgcccccaccactgtgatctatgaggataaccaaagac
cctctggggtccctgatcggttctctggctccatcgacagctcctccaactctgcctccctcaccatctctggactgaagactgag
gacgaggctgactactactgtcagtcttatgatagcaccatcacggtgttcggcggagggaccaagctgaccgtcctaggt
[SEQ ID NO: 209]
tctagaggtggtggtggtagcggcggcggcggctctggtggtggtggatccctcgagatggcc [SEQ ID NO: 305]
caggtccagctggtacagtctggggctgaggtgaagaagcctgggtcctcggtgaaggtctcctgcaaggcttctggag
gcaccttcagcagctatgctatcagctgggtgcgacaggcccctggacaagggcttgagtggatgggagggatcatccc
tatctttggtacagcaaactacgcacagaagttccagggcagagtcacgattaccgcggacgaatccacgagcacagc
ctacatggagctgagcagcctgagatctgaggacacggccgtgtattactgtgcgggggagggttactatgatagtagt
ggttattccaacggtgatgcttttgatatctggggccaagggacaatggtcaccgtctcttca [SEQ ID NO: 210]
ACTAGTGGCCAGGCCGGCCAGCACCATCACCATCACCATGGCGCATACCCGT
ACGACGTTCCGGACTACGCTTCT [SEQ ID NO: 306]
Amino Acid Sequence
(light chain variable region scFv linker heavy
chain variable region His tag + HA tag)
QAVLTQPHSVSESPGKTVTISCTRSSGSIASNYVQWYQQRPGSAPTTVIYEDNQRP
SGVPDRFSGSIDSSSNSASLTISGLKTEDEADYYCQSYDSTITVFGGGTKLTVLG
[SEQ ID NO: 211]
SRGGGGSGGGGSGGGGSLEMA [SEQ ID NO: 307]
QVQLVQSGAEVKKPGSSVKVSCKASGGTFSSYAISWVRQAPGQGLEWMGGI
IPIFGTANYAQKFQGRVTITADESTSTAYMELSSLRSEDTAVYYCAGEGYYDS
SGYSNGDAFDIWGQGTMVTVSS [SEQ ID NO: 212]
TSGQAGQHHHHHHGAYPYDVPDYAS [SEQ ID NO: 308]

TABLE 54
ET200-104

DNA Sequence
(light chain variable region scFv linker heavy chain variable region His tag +
HA tag)
aattttatgctgactcagccccactctgtgtcggagtctccggggaagacggtaaccatctcctgcacccgcagcagtggcagca
ttgccagcaactatgtgcagtggtaccagcagcgcccgggcagtgcccccaccactgtgatctatgaggataaccaaagaccct
ctggggtccctgatcggttctctggctccatcgacagctcctccaactctgcctccctcaccatctctggactgaagactgaggac
gaggctgactactactgtcagtcttatgatagcagcaatgtggtattcggcggagggaccaaggtcaccgtcctaggt [SEQ
ID NO: 213]
tctagaggtggtggtggtagcggcggcggcggctctggtggtggtggatccctcgagatggcc [SEQ ID NO: 305]
gaggtgcagctggtggagtctgggggaggcttggtacagcctggagggtccctgagactctcctgtgcagcctctggatt
caccttcagtagttatgaaatgaactgggtccgccaggctccagggaaggggctggagtgggtttcatacattagtagta
gtggtagtaccatatactacgcagactctgtgaagggccgattcaccatctccagagacaacgccaagaactcactgtat
ctgcaaatgaacagcctgagagccgaggacacggctgtttattactgtgcacgctgggactacggtatggacgtctggg
gccaagggaccacggtcaccgtctcctca [SEQ ID NO: 214]
ACTAGTGGCCAGGCCGGCCAGCACCATCACCATCACCATGGCGCATACCCGT
ACGACGTTCCGGACTACGCTTCT [SEQ ID NO: 306]
Amino Acid Sequence
(light chain variable region scFv linker heavy
chain variable region His tag + HA tag)
NFMLTQPHSVSESPGKTVTISCTRSSGSIASNYVQWYQQRPGSAPTTVIYEDNQRP
SGVPDRFSGSIDSSSNSASLTISGLKTEDEADYYCQSYDSSNVVFGGGTKVTVLG
[SEQ ID NO: 215]
SRGGGGSGGGGSGGGGSLEMA [SEQ ID NO: 307]
EVQLVESGGGLVQPGGSLRLSCAASGFTFSSYEMNWVRQAPGKGLEWVSYI
SSSGSTIYYADSVKGRFTISRDNAKNSLYLQMNSLRAEDTAVYYCARWDYG
MDVWGQGTTVTVSS [SEQ ID NO: 216]
TSGQAGQHHHHHHGAYPYDVPDYAS [SEQ ID NO: 308]

TABLE 55
ET200-105

DNA Sequence
(light chain variable region scFv linker heavy chain variable region His tag +
HA tag)
tcctatgtgctgactcagccaccctcagtgtccgtgtccccaggacagacagccagcatcacctgctctggagatagattgacga
ataaatatgtttcctggtatcaacagaagccaggccagtcccctgtgttggtcatctatgaggatgccaagcggccctcagggatc
cctgcgcgattctctggctccaactctgggaacacagccactctgaccatcagcgggacccaggctatggatgagtctgaatatt
actgtcaggcgtgggacagcagtgtggtggtttttggcggagggaccaagctgaccgtcctaggt [SEQ ID NO: 217]
tctagaggtggtggtggtagcggcggcggcggctctggtggtggtggatccctcgagatggcc [SEQ ID NO: 305]
gaggtgcagctggtggagtctgggggaggcttggtacagcctggcaggtccctgagactctcctgtgcagcctctggatt
tacctttgatgattatgccatgcactgggtccggcaagctccagggaagggcctggagtgggtctcaggtattagttgga
atagtggtagtataggctatgcggactctgtgaagggccgattcaccatctccagagacaacgccaagaactccctgtat
ctgcaaatgaacagtctgagagatgaggacacggccttgtattactgtgcaaaagaccgaggggggggagttatcgtta
aggatgcttttgatatctggggccaagggacaatggtcaccgtctcttca [SEQ ID NO: 218]
ACTAGTGGCCAGGCCGGCCAGCACCATCACCATCACCATGGCGCATACCCGT
ACGACGTTCCGGACTACGCTTCT [SEQ ID NO: 306]
Amino Acid Sequence
(light chain variable region scFv linker heavy
chain variable region His tag + HA tag)
SYVLTQPPSVSVSPGQTASITCSGDRLTNKYVSWYQQKPGQSPVLVIYEDAKRPS
GIPARFSGSNSGNTATLTISGTQAMDESEYYCQAWDSSVVVFGGGTKLTVLG
[SEQ ID NO: 219]
SRGGGGSGGGGSGGGGSLEMA [SEQ ID NO: 307]
EVQLVESGGGLVQPGRSLRLSCAASGFTFDDYAMHWVRQAPGKGLEWVSG
ISWNSGSIGYADSVKGRFTISRDNAKNSLYLQMNSLRDEDTALYYCAKDRGG
GVIVKDAFDIWGQGTMVTVSS [SEQ ID NO: 220]
TSGQAGQHHHHHHGAYPYDVPDYAS [SEQ ID NO: 308]

TABLE 56
ET200-106

DNA Sequence
(light chain variable region scFv linker heavy chain variable region His tag +
HA tag)
tcctatgagctgactcagccacccgcagcgtctgggacccccggacagagagtcaccatctcttgttctgggggcgtctccaac
atcgggagtggtgctctaaattggtaccagcaactcccaggaacggcccccaaactcctcatctatagttacaatcagcggccct
caggggtctctgaccgattctctggctccaggtctgccacctcagcctccctggccatcagtgggctccagtctgaggatgaggc
tgattattactgtgcaacctgggatgatagtgtgaatggttgggtgttcggcggagggaccaagctgaccgtcctaggt [SEQ
ID NO: 221]
tctagaggtggtggtggtagcggcggcggcggctctggtggtggtggatccctcgagatggcc [SEQ ID NO: 305]
gaggtgcagctggtggagtctggagctgaggtgaagaagcctggggattcagtgaaggtctcctgcaagccttctggtt
acaattttctcaactatggtatcaactgggtgcgacaggcccctggacaagggcttgagtggatgggatggattagcact
tacaccggtaacacaaactatgcacagaagctgcagggcagagtcaccttcaccacagacacatccacgagcacagcc
tacatggagatgaggagcctgagatctgacgacacggccgtgtattactgtgcgcgccagcagggtggtggttggtacg
atgtttggggtcaaggtactctggtcaccgtctcctca [SEQ ID NO: 222]
ACTAGTGGCCAGGCCGGCCAGCACCATCACCATCACCATGGCGCATACCCGT
ACGACGTTCCGGACTACGCTTCT [SEQ ID NO: 306]
Amino Acid Sequence
(light chain variable region scFv linker heavy
chain variable region His tag + HA tag)
SYELTQPPAASGTPGQRVTISCSGGVSNIGSGALNWYQQLPGTAPKLLIYSYNQR
PSGVSDRFSGSRSATSASLAISGLQSEDEADYYCATWDDSVNGWVFGGGTKLTV
LG [SEQ ID NO: 223]
SRGGGGSGGGGSGGGGSLEMA [SEQ ID NO: 307]
EVQLVESGAEVKKPGDSVKVSCKPSGYNFLNYGINWVRQAPGQGLEWMG
WISTYTGNTNYAQKLQGRVTFTTDTSTSTAYMEMRSLRSDDTAVYYCARQQ
GGGWYDVWGQGTLVTVSS [SEQ ID NO: 224]
TSGQAGQHHHHHHGAYPYDVPDYAS [SEQ ID NO: 308]

TABLE 57
ET200-107

DNA Sequence
(light chain variable region scFv linker heavy chain variable region His tag +
HA tag)
cagtctgtcgtgacgcagccgccctcagtgtctgcggccccaggagagaaggtcaccatctcctgctctggaagcaacttcaat
gttggaaataatgatgtatcctggtatcagcaactcccaggtgcagcccccaaactcctcatttatgacaataataagcgaccctca
gggattcctgaccgattctctggctccaagtctggcacgtcagccaccctggacatcaccgggctccacagtgacgacgaggc
cgattattactgcggaacatgggatagcagcctgaatactgggggggtcttcggaactgggaccaaggtcaccgtcctaggt
[SEQ ID NO: 225]
tctagaggtggtggtggtagcggcggcggcggctctggtggtggtggatccctcgagatggcc [SEQ ID NO: 305]
gaggtccagctggtgcagtctggagctgaggtgaagaagcctggggcctcagtgaaggtctcctgcaaggcttctggtt
acacctttaccagctatactatcagctgggtacgacaggcccctggacaagggcttgagtggatgggatggatcagcac
ttacaatggtctcacaaactatgcacagaacctccagggcagagtcaccatgactacagacacattcacgaccacagcc
tacatggagctgaggagcctcagatctgacgacacggccgtgtattactgtgtgagagaggggtcccccgactacggtg
acttcgcgtcctttgactactggggccagggaaccctggtcaccgtctcctca [SEQ ID NO: 226]
ACTAGTGGCCAGGCCGGCCAGCACCATCACCATCACCATGGCGCATACCCGT
ACGACGTTCCGGACTACGCTTCT [SEQ ID NO: 306]
Amino Acid Sequence
(light chain variable region scFv linker heavy
chain variable region His tag + HA tag)
QSVVTQPPSVSAAPGEKVTISCSGSNFNVGNNDVSWYQQLPGAAPKLLIYDNNK
RPSGIPDRFSGSKSGTSATLDITGLHSDDEADYYCGTWDSSLNTGGVFGTGTKVT
VLG [SEQ ID NO: 227]
SRGGGGSGGGGSGGGGSLEMA [SEQ ID NO: 307]
EVQLVQSGAEVKKPGASVKVSCKASGYTFTSYTISWVRQAPGQGLEWMGW
ISTYNGLTNYAQNLQGRVTMTTDTFTTTAYMELRSLRSDDTAVYYCVREGS
PDYGDFASFDYWGQGTLVTVSS [SEQ ID NO: 228]
TSGQAGQHHHHHHGAYPYDVPDYAS [SEQ ID NO: 308]

TABLE 58
ET200-108

DNA Sequence
(light chain variable region scFv linker heavy chain variable region His tag +
HA tag)
cagtctgtgttgacgcagccgccctcagtgtctgcgcccccgggacagaaggtcaccatctcctgctctggaagcagctccaac
attgggaataattatgtatcctggtaccagcagttcccaggaacagcccccaaactcctcatttatgacaataataagcgaccctca
gggatttctgaccgattctctggctccaagtctggcacgtcagccaccctgggcatcgccggactccagactggggacgaggc
cgattattactgcggaacatgggataccagcctgagtggtttttatgtcttcggaagtgggaccaaggtcaccgtcctaggt
[SEQ ID NO: 229]
tctagaggtggtggtggtagcggcggcggcggctctggtggtggtggatccctcgagatggcc [SEQ ID NO: 305]
gaggtccagctggtacagtctggagctgaggtgaagaagcctggggcctcagtgaaggtctcctgcaaggcttctggtt
acacctttaccagctatactatcagctgggtacgacaggcccctggacaagggcttgagtggatgggatggatcagcac
ttacaatggtctcacaaactatgcacagaacctccagggcagagtcaccatgactacagacacattcacgaccacagcc
tacatggagctgaggagcctcagatctgacgacacggccgtgtattactgtgtgagagaggggtcccccgactacggtg
acttcgcgtcctttgactactggggccagggaaccctggtcaccgtctcctca [SEQ ID NO: 230]
ACTAGTGGCCAGGCCGGCCAGCACCATCACCATCACCATGGCGCATACCCGT
ACGACGTTCCGGACTACGCTTCT [SEQ ID NO: 306]
Amino Acid Sequence
(light chain variable region scFv linker heavy
chain variable region His tag + HA tag)
QSVLTQPPSVSAPPGQKVTISCSGSSSNIGNNYVSWYQQFPGTAPKLLIYDNNKRP
SGISDRFSGSKSGTSATLGIAGLQTGDEADYYCGTWDTSLSGFYVFGSGTKVTVL
G [SEQ ID NO: 231]
SRGGGGSGGGGSGGGGSLEMA [SEQ ID NO: 307]
EVQLVQSGAEVKKPGASVKVSCKASGYTFTSYTISWVRQAPGQGLEWMGW
ISTYNGLTNYAQNLQGRVTMTTDTFTTTAYMELRSLRSDDTAVYYCVREGS
PDYGDFASFDYWGQGTLVTVSS [SEQ ID NO: 232]
TSGQAGQHHHHHHGAYPYDVPDYAS [SEQ ID NO: 308]

TABLE 59
ET200-109

DNA Sequence
(light chain variable region scFv linker heavy chain variable region His tag +
HA tag)
ctgcctgtgctgactcagccaccctcagcgtctgcgacccccgggcagagggtcaccatctcttgttctggaaccacctccaaca
tcggaagtaatactgtacactggtaccagcagctcccagggacggcccccaaactcctcatctataataataatcagcggccctc
aggggtccctgaccgattctctggctccaagtctggcacctcagcctccctggccatcagtgggctccggtccgaggatgaggc
tacatattcctgtgcaacatgggatgacagcctgagtggtgtggtcttcggcggagggaccaagctgaccgtcctaggt [SEQ
ID NO: 233]
tctagaggtggtggtggtagcggcggcggcggctctggtggtggtggatccctcgagatggcc [SEQ ID NO: 305]
gaggtccagctggtgcagtctggggctgaggtgaagaagcctgggtcctcggtgaaggtctcctgcaaggcttctggag
gcaccttcagcagctatgctatcagctgggtgcgacaggcccctggacaagggcttgagtggatgggagggatcatccc
tatctttggtacagcaaactacgcacagaagttccagggcagagtcacgattaccgcggacgaatccacgagcacagc
ctacatggagctgagcagcctgagatctgaggacacggccgtgtattactgtgcgagagatcccgcctacggtgactac
gagtatgatgcttttgatatctggggccaagggacaatggtcaccgtctcttca [SEQ ID NO: 234]
ACTAGTGGCCAGGCCGGCCAGCACCATCACCATCACCATGGCGCATACCCGT
ACGACGTTCCGGACTACGCTTCT [SEQ ID NO: 306]
Amino Acid Sequence
(light chain variable region scFv linker heavy
chain variable region His tag + HA tag)
LPVLTQPPSASATPGQRVTISCSGTTSNIGSNTVHWYQQLPGTAPKLLIYNNNQRP
SGVPDRFSGSKSGTSASLAISGLRSEDEATYSCATWDDSLSGVVFGGGTKLTVLG
[SEQ ID NO: 235]
SRGGGGSGGGGSGGGGSLEMA [SEQ ID NO: 307]
EVQLVQSGAEVKKPGSSVKVSCKASGGTFSSYAISWVRQAPGQGLEWMGGI
IPIFGTANYAQKFQGRVTITADESTSTAYMELSSLRSEDTAVYYCARDPAYGD
YEYDAFDIWGQGTMVTVSS [SEQ ID NO: 236]
TSGQAGQHHHHHHGAYPYDVPDYAS [SEQ ID NO: 308]

TABLE 60
ET200-110

DNA Sequence
(light chain variable region scFv linker heavy chain variable region His tag +
HA tag)
cagtctgtgttgacgcagccgccctcagcgtctgggacccccgggcagagggtcaccatctcttgttctggaagcagctccaac
atcggaactaatggtgtaaactggttccagcagttcccaggaacggcccccaaactcctcatctatactaatgatcagcggccctc
aggggtccctgaccgattctctggctccaagtctggcacctcagcctccctggccatcagtgggctccagtctgcggatgaggct
gattattactgtgcagtgtgggaccacagcctgaatggtccggtgttcggcggagggaccaagctgaccgtcctaggt [SEQ
ID NO: 237]
tctagaggtggtggtggtagcggcggcggcggctctggtggtggtggatccctcgagatggcc [SEQ ID NO: 305]
caggtgcagctggtgcagtctggggctgaggtgaagaagcctgggtcctcggtgaaggtctcctgcaaggcttctggag
gcaccttcagcagctatgctatcagctgggtgcgacaggcccctggacaagggcttgagtggatgggagggatcatccc
tatctttggtacagcaaactacgcacagaagttccagggcagagtcacgattaccgcggacgaatccacgagcacagc
ctacatggagctgagcagcctgagatctgaggacacggccgtgtattactgtgcgagaggggccggttttgatgcttttg
atatctggggccaagggacaatggtcaccgtctcttca [SEQ ID NO: 238]
ACTAGTGGCCAGGCCGGCCAGCACCATCACCATCACCATGGCGCATACCCGT
ACGACGTTCCGGACTACGCTTCT [SEQ ID NO: 306]
Amino Acid Sequence
(light chain variable region scFv linker heavy
chain variable region His tag + HA tag)
QSVLTQPPSASGTPGQRVTISCSGSSSNIGTNGVNWFQQFPGTAPKLLIYTNDQRP
SGVPDRFSGSKSGTSASLAISGLQSADEADYYCAVWDHSLNGPVFGGGTKLTVL
G [SEQ ID NO: 239]
SRGGGGSGGGGSGGGGSLEMA [SEQ ID NO: 307]
QVQLVQSGAEVKKPGSSVKVSCKASGGTFSSYAISWVRQAPGQGLEWMGGI
IPIFGTANYAQKFQGRVTITADESTSTAYMELSSLRSEDTAVYYCARGAGFD
AFDIWGQGTMVTVSS [SEQ ID NO: 240]
TSGQAGQHHHHHHGAYPYDVPDYAS [SEQ ID NO: 308]

TABLE 61
ET200-111

DNA Sequence
(light chain variable region scFv linker heavy chain variable region His tag +
HA tag)
caggctgtgctgactcagccaccctcagcgtctgggacccccgggcagagggtcaccatctcttgttctggaagcagctccaac
atcggaagtaatactgtaaactggtaccagcagctcccaggaacggcccccaaactcctcatctatagtaataatcagcggccct
caggggtccctgaccgattctctggctccaagtctggcacctcagcctccctggccatcagtgggctccagtctgaggatgaga
ctgattattactgtgcagcatgggatgacagcctgaatggttatgtcttcggaactgggaccaaggtcaccgtcctaggt [SEQ
ID NO: 241]
tctagaggtggtggtggtagcggcggcggcggctctggtggtggtggatccctcgagatggcc [SEQ ID NO: 305]
caggtgcagctacagcagtggggcgcaggactgttgaagccttcggagaccctgtccctcacctgcgctgtctatggtgg
gtccttcagtggttactactggagctggatccgccagcccccagggaaggggctggagtggattggggaaatcaatcat
agtggaagcaccaactacaacccgtccctcaagagtcgagtcaccatatcagtagacacgtccaagaaccagttctccc
tgaagctgagctctgtgaccgccgcggacacggctgtgtattactgtgcgagagaggggctagatgcttttgatatctgg
ggccaagggacaatggtcaccgtctcttca [SEQ ID NO: 242]
ACTAGTGGCCAGGCCGGCCAGCACCATCACCATCACCATGGCGCATACCCGT
ACGACGTTCCGGACTACGCTTCT [SEQ ID NO: 306]
Amino Acid Sequence
(light chain variable region scFv linker heavy
chain variable region His tag + HA tag)
QAVLTQPPSASGTPGQRVTISCSGSSSNIGSNTVNWYQQLPGTAPKLLIYSNNQRP
SGVPDRFSGSKSGTSASLAISGLQSEDETDYYCAAWDDSLNGYVFGTGTKVTVL
G [SEQ ID NO: 243]
SRGGGGSGGGGSGGGGSLEMA [SEQ ID NO: 307]
QVQLQQWGAGLLKPSETLSLTCAVYGGSFSGYYWSWIRQPPGKGLEWIGEI
NHSGSTNYNPSLKSRVTISVDTSKNQFSLKLSSVTAADTAVYYCAREGLDAFD
IWGQGTMVTVSS [SEQ ID NO: 244]
TSGQAGQHHHHHHGAYPYDVPDYAS [SEQ ID NO: 308]

TABLE 62
ET200-112

DNA Sequence
(light chain variable region scFv linker heavy chain variable region His tag +
HA tag)
caggctgtgctgactcagccaccctcagcgtctgggacccccgggcagagggtcaccatctcttgttctggaagcagctccaac
atcggaagtaatactgtaaactggtaccagcagctcccaggaacggcccccaaactcctcatgtatagtaatgatcagcggccct
caggggtccctgaccgattctctggctccaagtctggcacctcagcctccctggccatcagtgggctccagtctgaggatgagg
ctgattattattgtgcagcatgggatgacagcctgaatggttatgtcttcgcagctgggacccagctcaccgttttaagt [SEQ
ID NO: 245]
tctagaggtggtggtggtagcggcggcggcggctctggtggtggtggatccctcgagatggcc [SEQ ID NO: 305]
caggtgcagctacagcagtggggcgcaggactgttgaagccttcggagaccctgtccctcacctgcgctgtctatggtgg
gtccttcagtggttactactggagctggatccgccagcccccagggaaggggctggagtggattggggaaatcaatcat
agtggaagcaccaactacaacccgtccctcaagagtcgagtcaccatatcagtagacacgtccaagaaccagttctccc
tgaagctgagctctgtgaccgccgcggacacggctgtgtattactgtgcgagagaggggctagatgcttttgatatctgg
ggccaagggacaatggtcaccgtctcttca [SEQ ID NO: 246]
ACTAGTGGCCAGGCCGGCCAGCACCATCACCATCACCATGGCGCATACCCGT
ACGACGTTCCGGACTACGCTTCT [SEQ ID NO: 306]
Amino Acid Sequence
(light chain variable region scFv linker heavy
chain variable region His tag + HA tag)
QAVLTQPPSASGTPGQRVTISCSGSSSNIGSNTVNWYQQLPGTAPKLLMYSNDQR
PSGVPDRFSGSKSGTSASLAISGLQSEDEADYYCAAWDDSLNGYVFAAGTQLTV
LS [SEQ ID NO: 247]
SRGGGGSGGGGSGGGGSLEMA [SEQ ID NO: 307]
QVQLQQWGAGLLKPSETLSLTCAVYGGSFSGYYWSWIRQPPGKGLEWIGEI
NHSGSTNYNPSLKSRVTISVDTSKNQFSLKLSSVTAADTAVYYCAREGLDAFD
IWGQGTMVTVSS [SEQ ID NO: 248]
TSGQAGQHHHHHHGAYPYDVPDYAS [SEQ ID NO: 308]

TABLE 63
ET200-113

DNA Sequence
(light chain variable region scFv linker heavy chain variable region His tag +
HA tag)
cagtctgtcgtgacgcagccgccctcagtgtctgcggccccaggacagaaggtcaccatctcctgctctggaagcagctccaa
cattgggaataattatgtatcctggtaccagcagctcccaggaacagcccccaaactcctcatttatgacaataataagcgaccct
cagggattcctgaccgattctctggctccaagtctggcacgtcagccaccctgggcatcactggactccagactggggacgag
gccgattattactgcggaacatgggatagcagcctgagtgctgcttatgtcttcggaactgggaccaaggtcaccgtcctaggt
[SEQ ID NO: 249]
tctagaggtggtggtggtagcggcggcggcggctctggtggtggtggatccctcgagatggcc [SEQ ID NO: 305]
caggtccagctggtacagtctggagctgaggtgaagaagcctggggcctcagtgaaggtctcctgcaaggcttctggtta
cagctttaccagctatactatcagctgggttcgacaggcccctggacaaggccttgagtggatgggatgggtcagcactt
acaatggtctcagaaactatgcacagaacctccagggcagagtcaccatgactacagacacactcacgaccacagcct
acatggagctgaggagcctcagatctgacgacacggccgtgtattattgtgtgagagaggggtcccccgactacggtga
cttcgcggcctttgactactggggccagggcaccctggtcaccgtctcctca [SEQ ID NO: 250]
ACTAGTGGCCAGGCCGGCCAGCACCATCACCATCACCATGGCGCATACCCGT
ACGACGTTCCGGACTACGCTTCT [SEQ ID NO: 306]
Amino Acid Sequence
(light chain variable region scFv linker heavy
chain variable region His tag + HA tag)
QSVVTQPPSVSAAPGQKVTISCSGSSSNIGNNYVSWYQQLPGTAPKLLIYDNNKR
PSGIPDRFSGSKSGTSATLGITGLQTGDEADYYCGTWDSSLSAAYVFGTGTKVTV
LG [SEQ ID NO: 251]
SRGGGGSGGGGSGGGGSLEMA [SEQ ID NO: 307]
QVQLVQSGAEVKKPGASVKVSCKASGYSFTSYTISWVRQAPGQGLEWMGW
VSTYNGLRNYAQNLQGRVTMTTDTLTTTAYMELRSLRSDDTAVYYCVREG
SPDYGDFAAFDYWGQGTLVTVSS [SEQ ID NO: 252]
TSGQAGQHHHHHHGAYPYDVPDYAS [SEQ ID NO: 308]

TABLE 64
ET200-114

DNA Sequence
(light chain variable region scFv linker heavy chain variable region His tag +
HA tag)
caggctgtgctgactcagccaccctcagcgtctgagacccccgggcagagggtcaccatctcttgttctggaagcaggtccaac
atcggaactaatattgtacactggtaccagcagcgcccaggaatggcccccaaactcctcacttatggtagtcggcggccctca
ggggtcccggaccgattctctggctccaagtttggcacctcagcctccctggccatcagtgggctccagtctgaggatgaggct
gattattattgtgcagcatgggatgacagtctgaatggtccggctttcggcggagggaccaagctgaccgtcctaggt [SEQ
ID NO: 253]
tctagaggtggtggtggtagcggcggcggcggctctggtggtggtggatccctcgagatggcc [SEQ ID NO: 305]
caggtgcagctacagcagtggggcgcaggactgttgaagccttcggagaccctgtccctcacctgcgctgtctatggtgg
gtccttcagtggttactactggagctggatccgccagcccccagggaaggggctggagtggattggggaaatcaatcat
agtggaagcaccaactacaacccgtccctcaagagtcgagtcaccatatcagtagacacgtccaagaaccagttctccc
tgaagctgagctctgtgaccgccgcggacacggctgtgtattactgtgcgagagacggtgggggctactttgactactgg
ggccagggaaccctggtcaccgtctcctca [SEQ ID NO: 254]
ACTAGTGGCCAGGCCGGCCAGCACCATCACCATCACCATGGCGCATACCCGT
ACGACGTTCCGGACTACGCTTCT [SEQ ID NO: 306]
Amino Acid Sequence
(light chain variable region scFv linker heavy
chain variable region His tag + HA tag)
QAVLTQPPSASETPGQRVTISCSGSRSNIGTNIVHWYQQRPGMAPKLLTYGSRRP
SGVPDRFSGSKFGTSASLAISGLQSEDEADYYCAAWDDSLNGPAFGGGTKLTVL
G [SEQ ID NO: 255]
SRGGGGSGGGGSGGGGSLEMA [SEQ ID NO: 307]
QVQLQQWGAGLLKPSETLSLTCAVYGGSFSGYYWSWIRQPPGKGLEWIGEI
NHSGSTNYNPSLKSRVTISVDTSKNQFSLKLSSVTAADTAVYYCARDGGGYF
DYWGQGTLVTVSS [SEQ ID NO: 256]
TSGQAGQHHHHHHGAYPYDVPDYAS [SEQ ID NO: 308]

TABLE 65
ET200-115

DNA Sequence
(light chain variable region scFv linker heavy chain variable region His tag +
HA tag)
cagtctgtgttgacgcagccgccctcagtgtctggggccccagggcagagggtcaccatctcctgcactgggagcagctccaa
tatcggggcacgttatgatgtacactggtaccagcaactcccaggaacagccccccgactcctcatctctgctaactacgatcgg
ccctcaggggtccctgaccgattctctggctccaagtctggcacctcagcctccctggccatcactgggctccaggctgaggat
gaggctgattattactgccagtcctatgacagcagtgtgagtgcttgggtgttcggcggagggaccaaggtcaccgtcctaggt
[SEQ ID NO: 257]
tctagaggtggtggtggtagcggcggcggcggctctggtggtggtggatccctcgagatggcc [SEQ ID NO: 305]
gaagtgcagctggtgcagtctggggctgaagtgaaggagcctggggcctcagtgaggatctcctgccaggcatctggat
acaacttcatcagttattatatgcactgggtgcggcaggcccctgggcaaggtcttgagtggatgggcaccatcaaccca
ggcagtggtgagacagactactcacagaagttgcagggcagagtcaccatgaccagggacccgtccacgggtacattc
gacatggggctgagcagcctgacatctggggacacggccgtctattattgtgcgacaggtctcatcagaggagctagcg
atgcttttaatatctggggccgggggacaatggtcaccgtctcttca [SEQ ID NO: 258]
ACTAGTGGCCAGGCCGGCCAGCACCATCACCATCACCATGGCGCATACCCGT
ACGACGTTCCGGACTACGCTTCT [SEQ ID NO: 306]
Amino Acid Sequence
(light chain variable region scFv linker heavy
chain variable region His tag + HA tag)
QSVLTQPPSVSGAPGQRVTISCTGSSSNIGARYDVHWYQQLPGTAPRLLISANYD
RPSGVPDRFSGSKSGTSASLAITGLQAEDEADYYCQSYDSSVSAWVFGGGTKVT
VLG [SEQ ID NO: 259]
SRGGGGSGGGGSGGGGSLEMA [SEQ ID NO: 307]
EVQLVQSGAEVKEPGASVRISCQASGYNFISYYMHWVRQAPGQGLEWMGT
INPGSGETDYSQKLQGRVTMTRDPSTGTFDMGLSSLTSGDTAVYYCATGLIR
GASDAFNIWGRGTMVTVSS [SEQ ID NO: 260]
TSGQAGQHHHHHHGAYPYDVPDYAS [SEQ ID NO: 308]

TABLE 66
ET200-116

DNA Sequence
(light chain variable region scFv linker heavy chain variable region His tag + HA tag)
cagcctgtgctgactcagccaccctcagtgtccgtgtccccaggacagacggccgccatcccctgttctggagataagttgggg
gataaatttgcttcctggtatcagcagaagccaggccagtcccctgtgctggtcatctatcaagatactaagcggccctcagggat
ccctgagcgattctctggctccaactctgggaacacagccactctgaccatcagcgggacccaggctatggatgaggctgacta
ttactgtcagacgtgggccagcggcattgtggtgttcggcggagggaccaagctgaccgtcctaggt [SEQ ID NO:
261]
tctagaggtggtggtggtagcggcggcggcggctctggtggtggtggatccctcgagatggcc [SEQ ID NO: 305]
caggtacagctgcagcagtcaggtccaggactggtgaagccctcgcagaccctctcactcacctgtgccatctccgggg
acagtgtctctagcaacagtgctgcttggaactggatcaggcagtccccatcgagaggccttgagtggctgggaaggac
atactacaggtccaagtggtataatgattatgcagtatctgtgaaaagtcgaataaccatcaacccagacacatccaag
aaccagttctccctgcagctgaactctgtgactcccgaggacacggctgtgtattactgtgcaagagagcgcagtggctg
gaagggatttgactactggggccagggaaccctggtcaccgtctcctca [SEQ ID NO: 262]
ACTAGTGGCCAGGCCGGCCAGCACCATCACCATCACCATGGCGCATACCCGT
ACGACGTTCCGGACTACGCTTCT [SEQ ID NO: 306]
Amino Acid Sequence
(light chain variable region scFv linker heavy chain variable region His tag + HA tag)
QPVLTQPPSVSVSPGQTAAIPCSGDKLGDKFASWYQQKPGQSPVLVIYQDTKRPS
GIPERFSGSNSGNTATLTISGTQAMDEADYYCQTWASGIVVFGGGTKLTVLG
[SEQ ID NO: 263]
SRGGGGSGGGGSGGGGSLEMA [SEQ ID NO: 307]
QVQLQQSGPGLVKPSQTLSLTCAISGDSVSSNSAAWNWIRQSPSRGLEWLGR
TYYRSKWYNDYAVSVKSRITINPDTSKNQFSLQLNSVTPEDTAVYYCARERS
GWKGFDYWGQGTLVTVSS [SEQ ID NO: 264]
TSGQAGQHHHHHHGAYPYDVPDYAS [SEQ ID NO: 308]

TABLE 67
ET200-117

DNA Sequence
(light chain variable region scFv linker heavy chain variable region His tag + HA tag)
gatgttgtgatgactcagtctccaccctccctgtccgtcacccctggagagccggcctccatcacctgcaggtctagtcagagcct
cctggaaagaaatgcatacaactacttggattggtacctgcagaggccaggacagtctccacagctcctgatctacttgggttcta
atcgggccgccggggtccctgacaggttcagtggcagtggatcaggcagagattttacactgaaaatcagcagagtggagcct
gaggatgttggggtttattactgcatgcaagctctacaagctccgttcactttcggcggagggaccaaggtggagatcaaacgt
[SEQ ID NO: 265]
tctagaggtggtggtggtagcggcggcggcggctctggtggtggtggatccctcgagatggcc [SEQ ID NO: 305]
gaagtgcagctggtgcagtctgggggaggcttggtacagcctggggggtccctgagactctcctgtgcagcctctggatt
cacctttagcagctatgccatgagctgggtccgccaggctccagggaaggggctggagtgggtctcagctattagtggta
gtggtggtagcacatactacgcagactccgtgaagggccggttcaccatctccagagacaattccaagaacacgctgta
tctgcaaatgaacagcctgagagccgaggacacggccgtatattactgtgcgaaatggggcccgtttcaggatgcttttg
atatctggggccaagggacaatggtcaccgtctcttca [SEQ ID NO: 266]
ACTAGTGGCCAGGCCGGCCAGCACCATCACCATCACCATGGCGCATACCCGT
ACGACGTTCCGGACTACGCTTCT [SEQ ID NO: 306]
Amino Acid Sequence
(light chain variable region scFv linker heavy chain variable region His tag + HA tag)
DVVMTQSPPSLSVTPGEPASITCRSSQSLLERNAYNYLDWYLQRPGQSPQLLIYL
GSNRAAGVPDRFSGSGSGRDFTLKISRVEPEDVGVYYCMQALQAPFTFGGGTKV
EIKR [SEQ ID NO: 267]
SRGGGGSGGGGSGGGGSLEMA [SEQ ID NO: 307]
EVQLVQSGGGLVQPGGSLRLSCAASGFTFSSYAMSWVRQAPGKGLEWVSAI
SGSGGSTYYADSVKGRFTISRDNSKNTLYLQMNSLRAEDTAVYYCAKWGPF
QDAFDIWGQGTMVTVSS [SEQ ID NO: 268]
TSGQAGQHHHHHHGAYPYDVPDYAS [SEQ ID NO: 308]

TABLE 68
ET200-118

DNA Sequence
(light chain variable region scFv linker heavy chain variable region His tag + HA tag)
caggctgtgctgactcagcctgcctccgtgtctgggtctcctggacagtcgatcaccatctcctgcactggaaccagcagtgacg
ttggtggttataactatgtctcctggtaccaacagcacccgggcaaagcccccaaactcatgatttatgaggtcagtaatcggccc
tcaggggtttctaatcgcttctctggctccaagtctggcaacacggcctccctgaccatctctgggctccaggctgaggacgagg
ctgattattactgcagctcatatacaagcagcagcaccccttatgtcttcggagcagggaccaaggtcaccgtcctaggt [SEQ
ID NO: 269]
tctagaggtggtggtggtagcggcggcggcggctctggtggtggtggatccctcgagatggcc [SEQ ID NO: 305]
gaggtgcagctggtggagtctgggggaggcttggtacagcctggcaggtccctgagactctcctgtgcagcctctggatt
cacctttgatgattatgccatgcactgggtccggcaagctccagggaagggcctggagtgggtctcaggtattagttgga
atagtggtagcataggctatgcggactctgtgaagggccgattcaccatctccagagacaacgccaagaactccctgtat
ctgcaaatgaacagtctgagagctgaggacacggccttgtattactgtgcaaaagccaggtggacagcagtggcatca
gaccaccactttgactactggggccagggaacgctggtcaccgtctcctca [SEQ ID NO: 270]
ACTAGTGGCCAGGCCGGCCAGCACCATCACCATCACCATGGCGCATACCCGT
ACGACGTTCCGGACTACGCTTCT [SEQ ID NO: 306]
Amino Acid Sequence
(light chain variable region scFv linker heavy chain variable region His tag + HA tag)
QAVLTQPASVSGSPGQSITISCTGTSSDVGGYNYVSWYQQHPGKAPKLMIYEVSN
RPSGVSNRFSGSKSGNTASLTISGLQAEDEADYYCSSYTSSSTPYVFGAGTKVTV
LG [SEQ ID NO: 271]
SRGGGGSGGGGSGGGGSLEMA [SEQ ID NO: 307]
EVQLVESGGGLVQPGRSLRLSCAASGFTFDDYAMHWVRQAPGKGLEWVSG
ISWNSGSIGYADSVKGRFTISRDNAKNSLYLQMNSLRAEDTALYYCAKARW
TAVASDHHFDYWGQGTLVTVSS [SEQ ID NO: 272]
TSGQAGQHHHHHHGAYPYDVPDYAS [SEQ ID NO: 308]

TABLE 69
ET200-119

DNA Sequence
(light chain variable region scFv linker heavy chain variable region His tag + HA tag)
caggctgtgcttactcagccaccctcagcgtctgggacccccgggcagagggtcaccatctcttgttctggaagcagctccaac
atcggaagtaatactgtaaactggtaccagcagctcccaggaacggcccccaaactcctcatctatagtaataatcagcggccct
caggggtccctgaccgattctctggctccaagtctggcacctcagcctccctggccatcagtgggctccagtctgaggatgagg
ctgattattactgtgcagcatgggatgacagcctgaatggttatgtcttcggaactgggaccaagctgaccgtcctaggt [SEQ
ID NO: 273]
tctagaggtggtggtggtagcggcggcggcggctctggtggtggtggatccctcgagatggcc [SEQ ID NO: 305]
gaggtgcagctggtgcagtctggggctgaggtgaagaagcctgggtcctcggtgaaggtctcctgcaaggcttctggag
gcaccttcagcagctatgctatcagctgggtgcgacaggcccctggacaagggcttgagtggatgggagggatcatccc
tatctttggtacagcaaactacgcacagaagttccagggcagagtcacgattaccgcggacgaatccacgagcacagc
ctacatggagctgagcagcctgagatctgaggacacggccgtgtattactgtgcgagagattgggactacatggacgtc
tggggcaaagggaccacggtcaccgtctcctca [SEQ ID NO: 274]
ACTAGTGGCCAGGCCGGCCAGCACCATCACCATCACCATGGCGCATACCCGT
ACGACGTTCCGGACTACGCTTCT [SEQ ID NO: 306]
Amino Acid Sequence
(light chain variable region scFv linker heavy chain variable region His tag + HA tag)
QAVLTQPPSASGTPGQRVTISCSGSSSNIGSNTVNWYQQLPGTAPKLLIYSNNQRP
SGVPDRFSGSKSGTSASLAISGLQSEDEADYYCAAWDDSLNGYVFGTGTKLTVL
G [SEQ ID NO: 275]
SRGGGGSGGGGSGGGGSLEMA [SEQ ID NO: 307]
EVQLVQSGAEVKKPGSSVKVSCKASGGTFSSYAISWVRQAPGQGLEWMGGI
IPIFGTANYAQKFQGRVTITADESTSTAYMELSSLRSEDTAVYYCARDWDYM
DVWGKGTTVTVSS [SEQ ID NO: 276]
TSGQAGQHHHHHHGAYPYDVPDYAS [SEQ ID NO: 308]

TABLE 70
ET200-120

DNA Sequence
(light chain variable region scFv linker heavy chain variable region His tag + HA tag)
tcctatgagctgactcagccaccctcagcgtctgggacccccgggcagagggtcaccatctcttgttctggaagcagctccaac
atcggaagtaatactgtaaactggtaccagcagctcccaggaacggcccccaaactcctcatctatagtaataatcagcggccct
caggggtccctgaccgattctctggctccaagtctggcacctcagcctccctggccatcagtgggctccagtctgaggatgagg
ctgattattactgtgcagcatgggatgacagcctgaatggttatgtcttcggaactgggaccaaggtcaccgtcctaggt [SEQ
ID NO: 277]
tctagaggtggtggtggtagcggcggcggcggctctggtggtggtggatccctcgagatggcc [SEQ ID NO: 305]
gaggtgcagctggtggagtctggagctgaggtgaagaagcctggggcctcagtgaaggtctcctgcaaggcttctggtt
acacctttaccagctatggtatcagctgggtgcgacaggcccctggacaagggcttgagtggatgggatggatcagcgc
ttacaatggtaacacaaactatgcacagaagctccagggcagagtcaccatgaccacagacacatccacgagcacagc
ctacatggagctgaggagcctgagatctgacgacacggccgtgtattactgtgcgagagacctatctcggggagctaac
ccgcattactactactactacggtatggacgtctggggccaagggaccacggtcaccgtctcctca [SEQ ID NO:
278]
ACTAGTGGCCAGGCCGGCCAGCACCATCACCATCACCATGGCGCATACCCGT
ACGACGTTCCGGACTACGCTTCT [SEQ ID NO: 306]
Amino Acid Sequence
(light chain variable region scFv linker heavy chain variable region His tag + HA tag)
SYELTQPPSASGTPGQRVTISCSGSSSNIGSNTVNWYQQLPGTAPKLLIYSNNQRP
SGVPDRFSGSKSGTSASLAISGLQSEDEADYYCAAWDDSLNGYVFGTGTKVTVL
G [SEQ ID NO: 279]
SRGGGGSGGGGSGGGGSLEMA [SEQ ID NO: 307]
EVQLVESGAEVKKPGASVKVSCKASGYTFTSYGISWVRQAPGQGLEWMGW
ISAYNGNTNYAQKLQGRVTMTTDTSTSTAYMELRSLRSDDTAVYYCARDLS
RGANPHYYYYYGMDVWGQGTTVTVSS [SEQ ID NO: 280]
TSGQAGQHHHHHHGAYPYDVPDYAS [SEQ ID NO: 308]

TABLE 71
ET200-121

DNA Sequence
(light chain variable region scFv linker heavy chain variable region His tag + HA tag)
cagtctgtgttgacgcagccgccctcagtgtctggggccccagggcagagggtcaccgtctcctgcactgggagcagatccaa
catcggggcaggatatgatgtacactggtaccagcaacttccaggaacagcccccaaactcctcatctatggaaatagtaatcgg
cctccaggggtccctgaccgattctctgggtctaagtctggcacctcagcctccctggtcatcactgggctccaggctgaggatg
ccgctgattattactgccagtcctatgacaacactgtgcgtgaatcaccttatgtcttcggaactgggaccaaggtcaccgtcctag
gt [SEQ ID NO: 281]
tctagaggtggtggtggtagcggcggcggcggctctggtggtggtggatccctcgagatggcc [SEQ ID NO: 305]
gaggtccagctggtacagtctggggctgaggtgaagaagcctggggcctcagtgaaggtctcctgcaaggtttccggat
acaccctcactgaattatccatgcactgggtgcgacaggctcctggaaaagggcttgagtggatgggaggttttgatcct
gaagatggtgaaacaatctacgcacagaagttccagggcagagtcaccatgaccgaggacacatctacagacacagc
ctacatggagctgagcagcctgagatctgaggacacggccgtgtattactgtgcaacagagagtaatttagtgtcccggc
actactactactacggtatggacgtctggggccaagggaccacggtcaccgtctcctca [SEQ ID NO: 282]
ACTAGTGGCCAGGCCGGCCAGCACCATCACCATCACCATGGCGCATACCCGT
ACGACGTTCCGGACTACGCTTCT [SEQ ID NO: 306]
Amino Acid Sequence
(light chain variable region scFv linker heavy chain variable region His tag + HA tag)
QSVLTQPPSVSGAPGQRVTVSCTGSRSNIGAGYDVHWYQQLPGTAPKLLIYGNS
NRPPGVPDRFSGSKSGTSASLVITGLQAEDAADYYCQSYDNTVRESPYVFGTGTK
VTVLG [SEQ ID NO: 283]
SRGGGGSGGGGSGGGGSLEMA [SEQ ID NO: 307]
EVQLVQSGAEVKKPGASVKVSCKVSGYTLTELSMHWVRQAPGKGLEWMG
GFDPEDGETIYAQKFQGRVTMTEDTSTDTAYMELSSLRSEDTAVYYCATESN
LVSRHYYYYGMDVWGQGTTVTVSS [SEQ ID NO: 284]
TSGQAGQHHHHHHGAYPYDVPDYAS [SEQ ID NO: 308]

TABLE 72
ET200-122

DNA Sequence
(light chain variable region scFv linker heavy chain variable region His tag + HA tag)
ctgcctgtgctgactcagccaccctcagcgtctgggacccccgggcagagggtcaccatctcttgttctggaaccagctccaac
atcggaagtaattctgtagactggtaccagcagctcccaggaacggcccccaaactcctcatctatagtaataatcagcggccct
caggggtccctgaccgaatctctggctccaagtctggcacctcagcctccctggccatcagtgggctccagtctgaggatgagg
ctgattattactgtgcagcatgggatgacagcctgaatggttatgtcttcggaactgggaccaaggtcaccgtcctaggt [SEQ
ID NO: 285]
tctagaggtggtggtggtagcggcggcggcggctctggtggtggtggatccctcgagatggcc [SEQ ID NO: 305]
gaagtgcagctggtgcagtctggggctgaggtgaagaagcctggggcctcagtgaaggtctcctgcaaggcttctggat
acaccttcaccggctactatatgcactgggtgcgacaggcccctggacaagggcttgagtggatgggatggatcaaccc
taacagtggtggcacaaactatgcacagaagtttcagggcagggtcaccatgaccagggacacgtccatcagcacagc
ctacatggagctgagcaggctgagatctgacgacacggccgtgtattactgtgcgagagattacggatactatggttcgg
ggagttattcgagcggccccctttactactactacggtatggacgtctggggccaagggaccacggtcaccgtctcctca
[SEQ ID NO: 286]
ACTAGTGGCCAGGCCGGCCAGCACCATCACCATCACCATGGCGCATACCCGT
ACGACGTTCCGGACTACGCTTCT [SEQ ID NO: 306]
Amino Acid Sequence
(light chain variable region scFv linker heavy chain variable region His tag + HA tag)
LPVLTQPPSASGTPGQRVTISCSGTSSNIGSNSVDWYQQLPGTAPKLLIYSNNQRP
SGVPDRISGSKSGTSASLAISGLQSEDEADYYCAAWDDSLNGYVFGTGTKVTVL
G [SEQ ID NO: 287]
SRGGGGSGGGGSGGGGSLEMA [SEQ ID NO: 307]
EVQLVQSGAEVKKPGASVKVSCKASGYTFTGYYMHWVRQAPGQGLEWMG
WINPNSGGTNYAQKFQGRVTMTRDTSISTAYMELSRLRSDDTAVYYCARDY
GYYGSGSYSSGPLYYYYGMDVWGQGTTVTVSS [SEQ ID NO: 288]
TSGQAGQHHHHHHGAYPYDVPDYAS [SEQ ID NO: 308]

TABLE 73
ET200-123

DNA Sequence
(light chain variable region scFv linker heavy chain variable region His tag + HA tag)
caggctgtgctgactcagccaccctcagcgtctgggacccccgggcagagggtcaccatctcttgttctggaagcagctccaac
atcggaagtaatactgtaaactggtaccagcagctcccaggaacggcccccaaactcctcatgtataataatgatcagcggccct
caggggtccctgaccgattctctggctccaagtctggcacctcagcctccctggccatcagtgggctccagtctgaggatgagg
ctgattattactgtgcagcatgggatgacagcctcaatggttatgtcttcggacctgggaccaaggtcaccgtcctaggt [SEQ
ID NO: 289]
tctagaggtggtggtggtagcggcggcggcggctctggtggtggtggatccctcgagatggcc [SEQ ID NO: 305]
caggtgcagctggtggagtctggagctgaggtgaagaagcctggggcctcagtgaaggtctcctgcaaggcttctggtt
acacctttaccagctatggtatcagctgggtgcgacaggcccctggacaagggcttgagtggatgggatggatcagcgc
ttacaatggtaacacaaactatgcacagaagctccagggcagagtcaccatgaccacagacacatccacgagcacagc
ctacatggagctgaggagcctgagatctgacgacacggccgtgtattactgtgcgagagacctatctcggggagctaac
ccgcattactactactactacggtatggacgtctggggccaagggaccacggtcaccgtctcctca [SEQ ID NO:
290]
ACTAGTGGCCAGGCCGGCCAGCACCATCACCATCACCATGGCGCATACCCGT
ACGACGTTCCGGACTACGCTTCT [SEQ ID NO: 306]
Amino Acid Sequence
(light chain variable region scFv linker heavy chain variable region His tag + HA tag)
QAVLTQPPSASGTPGQRVTISCSGSSSNIGSNTVNWYQQLPGTAPKLLMYNNDQ
RPSGVPDRFSGSKSGTSASLAISGLQSEDEADYYCAAWDDSLNGYVFGPGTKVT
VLG [SEQ ID NO: 291]
SRGGGGSGGGGSGGGGSLEMA [SEQ ID NO: 307]
QVQLVESGAEVKKPGASVKVSCKASGYTFTSYGISWVRQAPGQGLEWMGW
ISAYNGNTNYAQKLQGRVTMTTDTSTSTAYMELRSLRSDDTAVYYCARDLS
RGANPHYYYYYGMDVWGQGTTVTVSS [SEQ ID NO: 292]
TSGQAGQHHHHHHGAYPYDVPDYAS [SEQ ID NO: 308]

TABLE 74
ET200-125

DNA Sequence
(light chain variable region scFv linker heavy chain variable region His tag + HA tag)
aattttatgctgactcagccccacgctgtgtcggagtctccggggaagacggtaaccatctcctgcacccgcagcagtggcagt
attgccagcaactatgtgcagtggtaccagcagcgcccgggcagttccccccgcactgtgatttatgaggataatcaaagaccct
ctggggtccctggtcggttctctggctccatcgacagctcctccaactctgcctccctcaccatctctggactgaagactgaggac
gaggctgactactactgtcagtcttatgattccaccagtgtgcttttcggcggagggaccaagctgaccgtcctaggt [SEQ
ID NO: 293]
tctagaggtggtggtggtagcggcggcggcggctctggtggtggtggatccctcgagatggcc [SEQ ID NO: 305]
gaggtccagctggtgcagtctggggctgaggtgaagaagccagggtcctcggtgaaggtctcctgcaaggcctcggga
ggcaccttcagcagcaattctctcagctgggtgcgacaggcccctggacaagggcttgagtggatgggaaggatcttcc
ctatcctgggtataacaaactatgcacagaagttccagggcagagtcacgattaccgcggacaaatccacgagcacag
cctacatggagctgagcagcctgagatctgaggacacggccgtctattactgtgcgagaggaaactaccaatggtatga
tgcttttgatatctggggccaagggacaatggtcaccgtctcttca [SEQ ID NO: 294]
ACTAGTGGCCAGGCCGGCCAGCACCATCACCATCACCATGGCGCATACCCGT
ACGACGTTCCGGACTACGCTTCT [SEQ ID NO: 306]
Amino Acid Sequence
(light chain variable region scFv linker heavy chain variable region His tag + HA tag)
NFMLTQPHAVSESPGKTVTISCTRSSGSIASNYVQWYQQRPGSSPRTVIYEDNQR
PSGVPGRFSGSIDSSSNSASLTISGLKTEDEADYYCQSYDSTSVLFGGGTKLTVLG
[SEQ ID NO: 295]
SRGGGGSGGGGSGGGGSLEMA [SEQ ID NO: 307]
EVQLVQSGAEVKKPGSSVKVSCKASGGTFSSNSLSWVRQAPGQGLEWMGRI
FPILGITNYAQKFQGRVTITADKSTSTAYMELSSLRSEDTAVYYCARGNYQW
YDAFDIWGQGTMVTVSS [SEQ ID NO: 296]
TSGQAGQHHHHHHGAYPYDVPDYAS [SEQ ID NO: 308]

TABLE 75
ET200-005

DNA Sequence
(light chain variable region scFv linker heavy chain variable region His tag + HA tag)
cagcctgtgctgactcagccaccctcagtgtcagtggtcccaggaaagacggccaggattacctgtgggggaaaaaacattgg
aagtaaaagtgtgcactggtaccagcagaagccaggccaggcccctgtggtggtcatccattatgatagtgaccggccctcag
ggatccctgagcgattctctggctccaactctgggaacacggccaccctgaccatcagcagggtcgaagccggggatgaggc
cgactattactgtcaggtgtgggatagtagtagtgatcatccttatgtcttcggaactgggaccaaggtcaccgtcctaggt
[SEQ ID NO: 297]
tctagaggtggtggtggtagcggcggcggcggctctggtggtggtggatccctcgagatggcc [SEQ ID NO: 305]
caggtgcagctggtgcagtctggagctgaggtgaagaagcctggggcctcagtgaaggtctcctgcaaggcttctggtt
acacctttaccaactatggtatcagctgggtgcgacaggcccctggacaagggcttgagtggatgggatggatcagcgc
ttacaatggtaacacaaactatgcacataagctccagggcagagtcaccatgaccacagacacatccacgagcacagc
caacatggagctgaggagcctgagacctgacgacactgccgtgtattactgtgcgcgctcttacttcggttctcatgatta
ctggggtcaaggtactctggtgaccgtctcctca [SEQ ID NO: 298]
ACTAGTGGCCAGGCCGGCCAGCACCATCACCATCACCATGGCGCATACCCGT
ACGACGTTCCGGACTACGCTTCT [SEQ ID NO: 306]
Amino Acid Sequence
(light chain variable region scFv linker heavy chain variable region His tag + HA tag)
QPVLTQPPSVSVVPGKTARITCGGKNIGSKSVHWYQQKPGQAPVVVIHYDSDRP
SGIPERFSGSNSGNTATLTISRVEAGDEADYYCQVWDSSSDHPYVFGTGTKVTVL
G [SEQ ID NO: 299]
SRGGGGSGGGGSGGGGSLEMA [SEQ ID NO: 307]
QVQLVQSGAEVKKPGASVKVSCKASGYTFTNYGISWVRQAPGQGLEWMG
WISAYNGNTNYAHKLQGRVTMTTDTSTSTANMELRSLRPDDTAVYYCARSY
FGSHDYWGQGTLVTVSS [SEQ ID NO: 300]
TSGQAGQHHHHHHGAYPYDVPDYAS [SEQ ID NO: 308]

TABLE 76
ET200-124

DNA Sequence
(light chain variable region scFv linker heavy chain variable region His tag + HA tag)
tcctatgtgctgactcagccaccctcggtgtcagtggccccaggaaagacggccaggatttcctgtgggggaaacgacattgga
agtaaaagtgttttctggtatcagcagaggccaggccaggcccctgtgttggtcgtctatgatgatagcgaccggccctcagggc
tccctgagcgattctctggcttcaactctgggaacacggccaccctgaccatcagcagggtcgaagccggggatgaggccgac
tattactgtcaagtgtgggatagtagtagtgatcattatgtcttcggaactgggaccaaggtcaccgtcctaggt [SEQ ID
NO: 301]
tctagaggtggtggtggtagcggcggcggcggctctggtggtggtggatccctcgagatggcc [SEQ ID NO: 305]
caggtgcagctggtggagtctgggggaggcttggtacagcctggcaggtccctgagactctcctgtgcagcctctggatt
cacctttgatgattatgccatgcactgggtccggcaagctccagggaagggcctggagtgggtctcaggtattagttgga
atagtggtagcataggctatgcggactctgtgaagggccgattcaccatctccagagacaacgccaagaactccctgtat
ctgcaaatgaacagtctgagagctgaggacacggccttgtattactgtgcaaaagatataacctatggttcggggagtta
tggtgcttttgatatctggggccaagggacaatggtcaccgtctcttca [SEQ ID NO: 302]
ACTAGTGGCCAGGCCGGCCAGCACCATCACCATCACCATGGCGCATACCCGT
ACGACGTTCCGGACTACGCTTCT [SEQ ID NO: 306]
Amino Acid Sequence
(light chain variable region scFv linker heavy chain variable region His tag + HA tag)
SYVLTQPPSVSVAPGKTARISCGGNDIGSKSVFWYQQRPGQAPVLVVYDDSDRP
SGLPERFSGFNSGNTATLTISRVEAGDEADYYCQVWDSSSDHYVFGTGTKVTVL
G [SEQ ID NO: 303]
SRGGGGSGGGGSGGGGSLEMA [SEQ ID NO: 307]
QVQLVESGGGLVQPGRSLRLSCAASGFTFDDYAMHWVRQAPGKGLEWVSG
ISWNSGSIGYADSVKGRFTISRDNAKNSLYLQMNSLRAEDTALYYCAKDITY
GSGSYGAFDIWGQGTMVTVSS [SEQ ID NO: 304]
TSGQAGQHHHHHHGAYPYDVPDYAS [SEQ ID NO: 308]

TABLE 77
ET200-001

DNA Sequence
Cagtctgtgttgacgcagccaccctcagcgtctgggacccccgggcagagggtcaccatctcttgttctggaagcagctccaac
atcggaagtaatactgtaaactggtaccagcagctcccaggaacggcccccaaactcctcatctatagtaataatcagcggccct
caggggtccctgaccgattctctggctccaagtctggcacctcagcctccctggccatcagtgggctccagtctgaggatgagg
ctgattattactgtgcagcatgggatgacagcctgaatggttatgtcttcggaactgggaccaaggtcaccgtcctaggttctaga
ggtggtggtggtagcggcggcggcggctctggtggtggtggatccctcgagatggcccaggtgcagctacagcagtggggc
gcaggactgttgaagccttcggagaccctgtccctcacctgcgctgtgtatggtgggtccttcagtggttactactggagctggat
ccgccagcccccagggaaggggctggagtggattggggaaatcaatcatagtggaagcaccaactacaacccgtccctcaag
agtcgagtcaccatatcagtagacacgtccaagaaccagttctccctgaagctgagctctgtgaccgccgcggacacggccgt
gtattactgtgcgcgcgaaggtccgtacgacggtttcgattcttggggtcaaggtactctggtgaccgtctcctca [SEQ ID
NO: 593]
Amino Acid Sequence
QSVLTQPPSASGTPGQRVTISCSGSSSNIGSNTVNWYQQLPGTAPKLLIYSNNQRP
SGVPDRFSGSKSGTSASLAISGLQSEDEADYYCAAWDDSLNGYVFGTGTKVTVL
GSRGGGGSGGGGSGGGGSLEMAQVQLQQWGAGLLKPSETLSLTCAVYGGSFSG
YYWSWIRQPPGKGLEWIGEINHSGSTNYNPSLKSRVTISVDTSKNQFSLKLSSVT
AADTAVYYCAREGPYDGFDSWGQGTLVTVSS [SEQ ID NO: 594]

TABLE 78
ET200-002

DNA Sequence
Aattttatgctgactcagccccactctgtgtcggagtctccggggaagacggtaaccatctcctgcacccgcagcagtggcagc
attgccagcaactatgtgcagtggtaccagcagcgcccgggcagtgcccccaccactgtgatctatgaggataaccaaagacc
ctctggggtccctgatcggttctctggctccatcgacagctcctccaactctgcctccctcaccatctctggactgaagactgagg
acgaggctgactactactgtcagtcttatgatagcagcaattctgtggtattcggcggagggaccaagctgaccgtcctaggttct
agaggtggtggtggtagcggcggcggcggctctggtggtggtggatccctcgagatggcccaggtccagctggtacagtctg
gcactgaggtgaagaagcctggggcctcagtgagggtcgcctgcaaggcttctggttacccctttaacaaatatgacatcaactg
ggtgcgacaggcccctggacaagggcttgagtggatgggaggcatcatccctatctttcgtacaacaaactacgcacagaagtt
ccagggcagagtcacgattaccgcggacgaatccacgagcacagcctacatggagctgagcagcctgagatctgaggacac
ggccgtatattactgtgcgcgcgaatggttctactgggatatctggggtcaaggtactctggtgaccgtctcctca [SEQ ID
NO: 595]
Amino Acid Sequence
NFMLTQPHSVSESPGKTVTISCTRSSGSIASNYVQWYQQRPGSAPTTVIYEDNQRP
SGVPDRFSGSIDSSSNSASLTISGLKTEDEADYYCQSYDSSNSVVFGGGTKLTVLG
SRGGGGSGGGGSGGGGSLEMAQVQLVQSGTEVKKPGASVRVACKASGYPFNK
YDINWVRQAPGQGLEWMGGIIPIFRTTNYAQKFQGRVTITADESTSTAYMELSSL
RSEDTAVYYCAREWFYWDIWGQGTLVTVSS [SEQ ID NO: 596]

TABLE 79
ET200-003

DNA Sequence
Cagtctgtgttgactcagccaccctcagtgtccgtgtccccaggacagacagccagcatctcctgctctggaaataaattgggga
ctaagtatgtttactggtatcagaagaggccaggccagtcccctgtgttggtcatgtatgaagataatcagcggccctcagggatc
ccggagcggttctctggctccaactctgggaacacagccactctgaccatcagagggacccagactgtggatgaggctgactat
tactgtcaggcgtgggactccgacactttcgtggtcttcggcggagggaccaaggtcaccgtcctaggttctagaggtggtggtg
gtagcggcggcggcggctctggtggtggtggatccctcgagatggccgaggtgcagctggtggagaccgggggaggcgtg
gtccagcctgggaggtccctgagactctcctgtgcagcctctggattcaccttcagtagttatggcatgcactgggtccgccagg
ctccaggcaaggggctggagtgggtggcagttatatcacatgatggaagtaataaatactacgcagactccgtgaagggccgat
tcaccatctccagagacaattccaaggacacgctgtatctgcaaatgaacagcctgagaggtgaggacacggccgtatattact
gtgcgcgctctaaccagtggtctggttacttctctttcgattactggggtcaaggtactctggtgaccgtctcctca [SEQ ID
NO: 597]
Amino Acid Sequence
QSVLTQPPSVSVSPGQTASISCSGNKLGTKYVYWYQKRPGQSPVLVMYEDNQRP
SGIPERFSGSNSGNTATLTIRGTQTVDEADYYCQAWDSDTFVVFGGGTKVTVLG
SRGGGGSGGGGSGGGGSLEMAEVQLVETGGGVVQPGRSLRLSCAASGFTFSSYG
MHWVRQAPGKGLEWVAVISHDGSNKYYADSVKGRFTISRDNSKDTLYLQMNS
LRGEDTAVYYCARSNQWSGYFSFDYWGQGTLVTVSS [SEQ ID NO: 598]

TABLE 80
ET200-006

DNA Sequence
Tcctatgtgctgactcagccaccctcagtgtcagtggccccaggaaagacggccaggattacctgtgggggaaacaacattgg
aagtaaaagtgtgcactggtaccagcagaagccaggccaggcccctgtggtggtcatccattatgatagcgaccggccctcag
ggatccctgagcgattctctggctccaactctgggaacacggccaccctgaccatcagcagggtcgaagccggggatgaggc
cgactattactgtcaggtgtgggatagtagtagtgatcatccttatgtcttcggaactgggaccaaggtcaccgtcctaggttctag
aggtggtggtggtagcggcggcggcggctctggtggtggtggatccctcgagatggccgaggtgcagctggtgcagtctgga
gctgaggtgaagaagcctggggcctcagtgaaggtctcctgcaaggcttctggttacacctttaccacctatggtatcagctgggt
gcgacaggcccctggacaagggcttgagtggatgggatggatcaacacttacaatggtcacacaaactatgcacagaagctcc
agggcagagccacaatgaccgcagacacatccacgaacacagcctacatggagctgaggagcctgagatctgacgacactg
ccgtgtattactgtgcgcgcgttatctacggttctggtgattactggggtcaaggtactctggtgaccgtctcctca [SEQ ID
NO: 599]
Amino Acid Sequence
SYVLTQPPSVSVAPGKTARITCGGNNIGSKSVHWYQQKPGQAPVVVIHYDSDRP
SGIPERFSGSNSGNTATLTISRVEAGDEADYYCQVWDSSSDHPYVFGTGTKVTVL
GSRGGGGSGGGGSGGGGSLEMAEVQLVQSGAEVKKPGASVKVSCKASGYTFTT
YGISWVRQAPGQGLEWMGWINTYNGHTNYAQKLQGRATMTADTSTNTAYMEL
RSLRSDDTAVYYCARVIYGSGDYWGQGTLVTVSS [SEQ ID NO: 600]

TABLE 81
ET200-007

DNA Sequence
Tcctatgtgctgactcagccactctcagtgtcagtggccccaggaaagacggccaggattacctgtgggggaaacaacattgg
aagtaaaactgtgcactggtaccagcagaagccaggccaggcccctgtgctggtcatctattatgatagcgaccggccctcagg
gatccctgagcgattctctggctccaactctgggaacacggccaccctgaccatcagcagggtcgaagccggggatgaggcc
gactattactgtcaggtgtgggatagtagtagtgatcatcgggtgttcggcggagggaccaagctgaccgtcctaggttctagag
gtggtggtggtagcggcggcggcggctctggtggtggtggatccctcgagatggcccaggtgcagctgcaggagtcgggcc
caggactggtgaagccttcggagaccctgtccctcacctgcaatgtctctggttactccatcagcagtggttacttttggggctgga
tccggcagcccccagggaaggggctggagtggattgggagtatctatcatagtaggagcacctactacaacccgtccctcaag
agtcgagtcaccatatcagtagacacgtccaagaaccagttctccctgaagctgaactctgtgaccgccgcagacacggccgtg
tattactgtgcgcgcggttacggttacttcgattactggggtcaaggtactctggtgaccgtctcctca [SEQ ID NO: 601]
Amino Acid Sequence
SYVLTQPLSVSVAPGKTARITCGGNNIGSKTVHWYQQKPGQAPVLVIYYDSDRP
SGIPERFSGSNSGNTATLTISRVEAGDEADYYCQVWDSSSDHRVFGGGTKLTVLG
SRGGGGSGGGGSGGGGSLEMAQVQLQESGPGLVKPSETLSLTCNVSGYSISSGYF
WGWIRQPPGKGLEWIGSIYHSRSTYYNPSLKSRVTISVDTSKNQFSLKLNSVTAA
DTAVYYCARGYGYFDYWGQGTLVTVSS [SEQ ID NO: 602]

TABLE 82
ET200-008

DNA Sequence
Caatctgccctgactcagcctgcctccgtgtctgggtctcctggacagtcgatcaccatctcctgcactggaaccagcagtgacg
ttggtggttataactatgtctcctggtaccaacaacacccaggcaaagcccccaaactcatgatttatgatgtcagtaatcggccct
caggggtttctaatcgcttctctggctccaagtctggcaacacggcctccctgaccatctctgggctccaggctgaggacgaggc
tgattattactgcagctcatatacaagcagcagcacttcgaaggtgttcggcggagggaccaagctgaccgtcctaggttctaga
ggtggtggtggtagcggcggcggcggctctggtggtggtggatccctcgagatggccgaggtgcagctggtggagtctgggg
gaggtgtggtacggcctggggggtccctgagactctcctgtgcagcctctggattcacctttggtgattatggcatgagctgggtc
cgccaagctccagggaaggggctggagtgggtctctggtattaattggaatggtggtagcacaggttatgcagactctgtgaag
ggccgattcaccatctccagagacaacgccaagaactccctgtatctgcaaatgaacagtctgagagccgaggacacggccgt
atattactgtgcgcgctctaaatacaacttccatgtttactacgattactggggtcaaggtactctggtgaccgtctcctca [SEQ
ID NO: 603]
Amino Acid Sequence
QSALTQPASVSGSPGQSITISCTGTSSDVGGYNYVSWYQQHPGKAPKLMIYDVSN
RPSGVSNRFSGSKSGNTASLTISGLQAEDEADYYCSSYTSSSTSKVFGGGTKLTVL
GSRGGGGSGGGGSGGGGSLEMAEVQLVESGGGVVRPGGSLRLSCAASGFTFGD
YGMSWVRQAPGKGLEWVSGINWNGGSTGYADSVKGRFTISRDNAKNSLYLQM
NSLRAEDTAVYYCARSKYNFHVYYDYWGQGTLVTVSS [SEQ ID NO: 604]

TABLE 83
ET200-009

DNA Sequence
Cagtctgtgttgacgcagccaccctcagcgtctgggacccccgggcagacagtcaccatctcttgttctggaagcaactccaac
atcggaagtaattatgtatactggtaccagcagctcccaggaacggcccccaaactcctcatctataggaataatcagcggccct
caggggtccctgaccgattctcaggctccaagtctggcacctcagcctccctggccatcagtgggctccgctccgaggatgag
gctgattattactgtgcagcatgggatgacagcctgagtgcttatgtcttcggaactgggaccaaggtcaccgtcctaggttctag
aggtggtggtggtagcggcggcggcggctctggtggtggtggatccctcgagatggcccaggtgcagctggtgcagtctgga
gctgaggtgaagaagcctggggcctcagtgaaggtctcctgcaaggcttctggttacacctttaccagctatggtatcagctggg
tgcgacaggcccctggacaagggcttgagtggatgggatggatcagcgcttacaatggtaacacaaactatgcacagaagctc
cagggcagagtcaccatgaccacagacacatccacgagcacagcctacatggagctgaggagcctgagatctgacgacactg
ccgtgtattactgtgcgcgctcttctggtaacatggtttcttggaaagatatgtggggtcaaggtactctggtgaccgtctcctca
[SEQ ID NO: 605]
Amino Acid Sequence
QSVLTQPPSASGTPGQTVTISCSGSNSNIGSNYVYWYQQLPGTAPKLLIYRNNQR
PSGVPDRFSGSKSGTSASLAISGLRSEDEADYYCAAWDDSLSAYVFGTGTKVTVL
GSRGGGGSGGGGSGGGGSLEMAQVQLVQSGAEVKKPGASVKVSCKASGYTFTS
YGISWVRQAPGQGLEWMGWISAYNGNTNYAQKLQGRVTMTTDTSTSTAYMEL
RSLRSDDTAVYYCARSSGNMVSWKDMWGQGTLVTVSS [SEQ ID NO: 606]

TABLE 84
ET200-010

DNA Sequence
Caatctgccctgactcagcctgcctccgtgtctgggtctcctggacagtcgatcaccatctcctgcactggaaccagcagtgacg
ttggtggttataactctgtctcctggtaccaacaacacccaggcaaagcccccagactcatgatttatgatgtcagtaatcggccct
caggggtttctaatcgcttctctggctccaagtctggcaacacggcctccctgaccatctctgggctccaggctgaggacgaggc
tgattattactgcagctcatatacaagcagcagcacccctttagtcttcggaactgggaccaaggtcaccgtcctaggttctagag
gtggtggtggtagcggcggcggcggctctggtggtggtggatccctcgagatggcccaggtgcagctggtgcagtctggggc
tgaggtgaagaagcctggggcctcagtgaaggtctcctgcaaggcttctggttacacctttaccagctatggtatcagctgggtg
cgacaggcccctggacaagggcttgagtggatgggatggatcagcgcttacaatggtaacacaaactatgcacagaagctcca
gggcagagtcaccatgaccacagacacatccacgagcacagcctacatggagctgaggagcctgagatctgacgacacggc
cgtgtattactgtgcgcgcggtgctgttgcttaccatgattggggtcaaggtactctggtgaccgtctcctca [SEQ ID NO:
607]
Amino Acid Sequence
QSALTQPASVSGSPGQSITISCTGTSSDVGGYNSVSWYQQHPGKAPRLMIYDVSN
RPSGVSNRFSGSKSGNTASLTISGLQAEDEADYYCSSYTSSSTPLVFGTGTKVTVL
GSRGGGGSGGGGSGGGGSLEMAQVQLVQSGAEVKKPGASVKVSCKASGYTFTS
YGISWVRQAPGQGLEWMGWISAYNGNTNYAQKLQGRVTMTTDTSTSTAYMEL
RSLRSDDTAVYYCARGAVAYHDWGQGTLVTVSS [SEQ ID NO: 608]

TABLE 85
ET200-011

DNA Sequence
Cagtctgtcgtgacgcagccgccctcagtgtctgcggccccaggacagagggtcaccatctcctgctctggaagcagctccaa
catttcgatttatgatgtatcctggtatcagcagctcccaggaacagcccccaaactcctcatttatggcaataataagcgaccctc
ggggattgctgaccgattctctggctccacgtctggcacgtcagccaccctgggcatcaccggactccagactggggacgagg
ccgattattactgcggaacatgggatgacagtctgagtgggggggtgttcggcggagggaccaagctgaccgtcctaggttcta
gaggtggtggtggtagcggcggcggcggctctggtggtggtggatccctcgagatggcccagatgcagctggtgcaatctgg
ggctgaggtgaagaagcctgggtcctcggtgaaggtctcctgcgaggcttctggaggcaccctcagcagctatgctatcaactg
ggtgcgacaggcccctggacaagggcttgagtggatgggagggatcatccctatgtttggtacagcacactacgcacagaagt
tccagggcagagtcacgattaccgcggacgaatccacgaaaacagcctacatggagctgagcagcctgagatctgaggacac
tgccgtgtattactgtgcgcgcggtgttcattacgcttctttcgatcattggggtcaaggtactctggtgaccgtctcctca [SEQ
ID NO: 609]
Amino Acid Sequence
QSVVTQPPSVSAAPGQRVTISCSGSSSNISIYDVSWYQQLPGTAPKLLIYGNNKRP
SGIADRFSGSTSGTSATLGITGLQTGDEADYYCGTWDDSLSGGVFGGGTKLTVLG
SRGGGGSGGGGSGGGGSLEMAQMQLVQSGAEVKKPGSSVKVSCEASGGTLSSY
AINWVRQAPGQGLEWMGGIIPMFGTAHYAQKFQGRVTITADESTKTAYMELSSL
RSEDTAVYYCARGVHYASFDHWGQGTLVTVSS [SEQ ID NO: 610]

TABLE 86
ET200-012

DNA Sequence
Cagtctgtgttgacgcagccgccctcagtgtctgcggccgcaggacagaaggtcaccatctcctgctctggaagcgactccaa
cattgggaataattatgtgtcctggtatcaacacctcccagggacagcccccaaactcctcatttatgacgttaaaaatcgaccctc
agggattcctgaccggttctccggctccaagtctggctcgtcagccaccctaggcatcgccggactccagcctggggacgagg
ccgattattactgcggaacatgggacagtcggctggatgcctatgtcttcggaactgggaccaaggtcaccgtcctaggttctag
aggtggtggtggtagcggcggcggcggctctggtggtggtggatccctcgagatggcccagatgcagctggtgcaatctgga
gctgaggtgaagaagcctggggcctcagtgaaggtctcctgcaagacttctggtttcccctttaatatctttggaatcacctgggtg
cgacaggcccctggacaagggcttgagtggatgggatggatcagcggttacaacggtaacacagactacccacagaagttcc
agggcagagtcaccatgtccacagacacatccacgagtacagcctacatggagctgaggaacctgaaatctgacgacacggc
cgtgtattactgtgcgcgcggtgcttacggtggtatggatacttggggtcaaggtactctggtgaccgtctcctca [SEQ ID
NO: 611]
Amino Acid Sequence
QSVLTQPPSVSAAAGQKVTISCSGSDSNIGNNYVSWYQHLPGTAPKLLIYDVKNR
PSGIPDRFSGSKSGSSATLGIAGLQPGDEADYYCGTWDSRLDAYVFGTGTKVTVL
GSRGGGGSGGGGSGGGGSLEMAQMQLVQSGAEVKKPGASVKVSCKTSGFPFNI
FGITWVRQAPGQGLEWMGWISGYNGNTDYPQKFQGRVTMSTDTSTSTAYMELR
NLKSDDTAVYYCARGAYGGMDTWGQGTLVTVSS [SEQ ID NO: 612]

TABLE 87
ET200-013

DNA Sequence
Cagtctgtcgtgacgcagccgccctcagtgtctggggccccagggcagagggtcaccatctcctgcactgggagcacctcca
acatcggggcaggttatgatgtacactggtatcagcagcttccaggaacagcccccaaactcctcatctatactaacaactttcgg
ccctcaggggtccctgaccgattctctgcctccaagtctggcacttcagcttccctggccatcactggtctccaggctgaggatga
ggctgattattactgcggaacatgggatagcagcctgagtgccgttgtgttcggcggagggaccaagctgaccgtcctaggttct
agaggtggtggtggtagcggcggcggcggctctggtggtggtggatccctcgagatggccgaggtgcagctggtggagtctg
gaactgaggtgaagaagcctggggcctcagtgaaagtctcctgcaaggcttctggttacatgtttaccagttatggtctcaactgg
gtgcgacaggcccctggacaagggcttgagtggatgggatggatcagcgctaacaatggtaagacaaattatgctaagaaattc
caggacagagtcaccatgaccagagacacttccacgagcacaggctacatggaactgaggagcctgagatctgacgacacg
gccgtatattactgtgcgcgccatatcggtggttcttacttcgatcgttggggtcaaggtactctggtgaccgtctcctca [SEQ
ID NO: 613]
Amino Acid Sequence
QSVVTQPPSVSGAPGQRVTISCTGSTSNIGAGYDVHWYQQLPGTAPKLLIYTNNF
RPSGVPDRFSASKSGTSASLAITGLQAEDEADYYCGTWDSSLSAVVFGGGTKLT
VLGSRGGGGSGGGGSGGGGSLEMAEVQLVESGTEVKKPGASVKVSCKASGYMF
TSYGLNWVRQAPGQGLEWMGWISANNGKTNYAKKFQDRVTMTRDTSTSTGY
MELRSLRSDDTAVYYCARHIGGSYFDRWGQGTLVTVSS [SEQ ID NO: 614]

TABLE 88
ET200-014

DNA Sequence
Tcctatgtgctgactcagccaccctcagtgtcagtggccccaggaaagacggccaggattacctgtgggggaaacaacattgg
aagtaaaagtgtgcactggtaccagcagaagccaggccaggcccctgtgctggtcatctattatgatagcgaccggccctcagg
gatccctgagcgattctctggctccaactctgggaacacggccaccctgaccatcagcagggtcgaagccggggatgaggcc
gactattactgtcaggtgtgggatagtagtagtgatcattatgtcttcggaactgggaccaaggtcaccgtcctaggttctagaggt
ggtggtggtagcggcggcggcggctctggtggtggtggatccctcgagatggccgaggtgcagctggtggagactggggga
ggcttggtacagcctggggggtccctgagactctcctgtgcagcctctggattcacctttagcagctatgccatgagctgggtcc
gccaggctccagggaaggggctggagtgggtctcagctattagtggtagtgatggtagcacatactacgcagactccgtgaag
ggccggttcaccatctccagagacaattccaagaacacgctgtatctgcaaatgaacagcctgagagacgaggacacggccgt
atattactgtgcgcgctctcatgaagctaacctggttggtgattggtggggtcaaggtactctggtgaccgtctcctca [SEQ
ID NO: 615]
Amino Acid Sequence
SYVLTQPPSVSVAPGKTARITCGGNNIGSKSVHWYQQKPGQAPVLVIYYDSDRPS
GIPERFSGSNSGNTATLTISRVEAGDEADYYCQVWDSSSDHYVFGTGTKVTVLGS
RGGGGSGGGGSGGGGSLEMAEVQLVETGGGLVQPGGSLRLSCAASGFTFSSYA
MSWVRQAPGKGLEWVSAISGSDGSTYYADSVKGRFTISRDNSKNTLYLQMNSL
RDEDTAVYYCARSHEANLVGDWWGQGTLVTVSS [SEQ ID NO: 616]

TABLE 89
ET200-015

DNA Sequence
Cagtctgtggtgactcagccaccctcagtgtcagtggccccaggaaagacggccaggattacctgtgggggaaacaacattg
gaagtaaaagtgtgcactggtaccagcagaagccaggccaggcccctgtgctggtcatctattatgatagcgaccggccctcag
ggatccctgagcgattctctggctccaactctgggaacacggccaccctgaccatcagcagggtcgaagccggggatgaggc
cgactattactgtcaggtgtgggatagtagtagtgatgtggtattcggcggagggaccaagctgaccgtcctaggttctagaggt
ggtggtggtagcggcggcggcggctctggtggtggtggatccctcgagatggccgaggtccagctggtacagtctggagctg
aggtgaagaagcctggggcctcagtgaaggtctcctgcaaggcttctggttacacctttaccagctacggtatcagctgggtgcg
acaggcccctggacaagggcttgagtggatgggatggatcagcgcttacaatggtaacacaaactatgcacagaagctccagg
gcagagtcaccatgaccacagacacatccacgagcacagcctacatggagctgaggagcctgagatctgacgacacggccgt
gtattactgtgcgcgctggggtggtttcggtgctgttgatcattggggtcaaggtactctggtgaccgtctcctca [SEQ ID
NO: 617]
Amino Acid Sequence
QSVVTQPPSVSVAPGKTARITCGGNNIGSKSVHWYQQKPGQAPVLVIYYDSDRP
SGIPERFSGSNSGNTATLTISRVEAGDEADYYCQVWDSSSDVVFGGGTKLTVLGS
RGGGGSGGGGSGGGGSLEMAEVQLVQSGAEVKKPGASVKVSCKASGYTFTSYG
ISWVRQAPGQGLEWMGWISAYNGNTNYAQKLQGRVTMTTDTSTSTAYMELRS
LRSDDTAVYYCARWGGFGAVDHWGQGTLVTVSS [SEQ ID NO: 618]

TABLE 90
ET200-016

DNA Sequence
Tcttctgagctgactcaggaccctgctgtgtctgtggccttgggacagacagtcaagatcacgtgccaaggagacagcctcaca
gactaccatgcaacctggtaccagcagaagccaggacaggcccctgtcgctgtcatctatgctacaaacaaccggcccactgg
gatcccagaccgattctctggttccagttccggaaacacagcttctttgaccatcactggggctcaggcggaagatgaggctgac
tattactgtaattcccgggacagcggcacggacgaagtgttattcggcggagggaccaagctgaccgtcctaggttctagaggt
ggtggtggtagcggcggcggcggctctggtggtggtggatccctcgagatggccgaggtgcagctggtggagactggggga
ggcctggtcaagcctggggggtccctgagactctcctgtgcagcctctggattcaccttcagtagctatagcatgaactgggtcc
gccaggctccagggaaggggctggagtgggtctcatccattagtagtagtagtagttacatatactacgcagactcagtgaagg
gccgattcaccatctccagagacaacgccaagaactcactgtatctgcaaatgaacagcctgagagccgaggacacggccgtg
tattactgtgcgcgcggtcagggttacgattactggggtcaaggtactctggtgaccgtctcctca [SEQ ID NO: 619]
Amino Acid Sequence
SSELTQDPAVSVALGQTVKITCQGDSLTDYHATWYQQKPGQAPVAVIYATNNRP
TGIPDRFSGSSSGNTASLTITGAQAEDEADYYCNSRDSGTDEVLFGGGTKLTVLG
SRGGGGSGGGGSGGGGSLEMAEVQLVETGGGLVKPGGSLRLSCAASGFTFSSYS
MNWVRQAPGKGLEWVSSISSSSSYIYYADSVKGRFTISRDNAKNSLYLQMNSLR
AEDTAVYYCARGQGYDYWGQGTLVTVSS [SEQ ID NO: 620]

TABLE 91
ET200-017

DNA Sequence
Tcctatgtgctgactcagccaccctcggtgtcagtggccccaggaaagacggccaggattacctgtgggggaaacaacattgg
aagtaaaagtgtgcactggtaccagcagaagccaggccaggcccctgtgctggtcgtctatgatgatagcgaccggccctcag
ggatccctgagcgattctctggctccaactctgggaacacggccaccctgagcatcagcagggtcgaagccggggatgaggc
cgactattactgtcaggtgtgggatagtagtagtgatcatactgtcttcggaactgggaccaaggtcaccgtcctaggttctagag
gtggtggtggtagcggcggcggcggctctggtggtggtggatccctcgagatggcccaggtgcagctacagcagtggggcg
caggactgttgaagccttcggagaccctgtccctcacctgcgctgtctatggtgggtccttcagtggttactactggagctggatc
cgccagcccccagggaaggggctggagtggattggggaaatcaatcatagtggaagcaccaactacaacccgtccctcaaga
gtcgagtcaccatatcagtagacacgtccaagaaccagttctccctgaagctgagctctgtgaccgccgcggacacggccgtgt
attactgtgcgcgctactacccgggtatggatatgtggggtcaaggtactctggtgaccgtctcctca [SEQ ID NO: 621]
Amino Acid Sequence
SYVLTQPPSVSVAPGKTARITCGGNNIGSKSVHWYQQKPGQAPVLVVYDDSDRP
SGIPERFSGSNSGNTATLSISRVEAGDEADYYCQVWDSSSDHTVFGTGTKVTVLG
SRGGGGSGGGGSGGGGSLEMAQVQLQQWGAGLLKPSETLSLTCAVYGGSFSGY
YWSWIRQPPGKGLEWIGEINHSGSTNYNPSLKSRVTISVDTSKNQFSLKLSSVTA
ADTAVYYCARYYPGMDMWGQGTLVTVSS [SEQ ID NO: 622]

TABLE 92
ET200-018

DNA Sequence
Caggctgtgctgactcagccgccctcaacgtctgggacccccgggcagagggtcaccatctcttgttctggaagcagctccaa
catcgggagaaatggtgtaaactggtaccagcagctcccaggagcggcccccaaagtcctcatctataatgataatcagcgacc
ctcaggggtccctgaccgagtctctggctcccagtctggctcctcaggcaccctggccatcgatgggcttcggtctgaggatga
ggctgattattactgtgcggcatgggatgacagcctgcatggtgtggtattcggcggagggaccaagctgaccgtcctaggttct
agaggtggtggtggtagcggcggcggcggctctggtggtggtggatccctcgagatggcccaggtccagctggtacagtctg
gggctgaggtgaagaagcctggggcctcagtgaaggtctcctgcaaggtttccggatacaccctcaatgaattatccatgcactg
ggtgcgacaggctcctggaaaagggcttgagtggatgggaggttttgatcctgaagatggtgaaacaatctacgcacagaagtt
ccagggcagagtcaccatgaccgaggacacatctacagacacagcctacatggagctgagcagcctgagatctgaggacact
gccgtgtattactgtgcgcgcggtggttacggtgattcttggggtcaaggtactctggtgaccgtctcctca [SEQ ID NO:
623]
Amino Acid Sequence
QAVLTQPPSTSGTPGQRVTISCSGSSSNIGRNGVNWYQQLPGAAPKVLIYNDNQR
PSGVPDRVSGSQSGSSGTLAIDGLRSEDEADYYCAAWDDSLHGVVFGGGTKLTV
LGSRGGGGSGGGGSGGGGSLEMAQVQLVQSGAEVKKPGASVKVSCKVSGYTL
NELSMHWVRQAPGKGLEWMGGFDPEDGETIYAQKFQGRVTMTEDTSTDTAYM
ELSSLRSEDTAVYYCARGGYGDSWGQGTLVTVSS [SEQ ID NO: 624]

TABLE 93
ET200-019

DNA Sequence
Aattttatgctgactcagccccactctgtgtcggagtctccggggaagacggtaaccatctcctgcacccgcagcagtggcagc
attgccagcaactatgtgcagtggtaccagcagcgcccgggcagtgcccccaccactgtgatctatgaggataaccaaagacc
ctctggggtccctgatcggttctctggctccatcgacagctcctccaactctgcctccctcaccatctctggactgaagactgagg
acgaggctgactactactgtcagtcttatgatagcagcaattcttgggtgttcggcggagggaccaagctgaccgtcctaggttct
agaggtggtggtggtagcggcggcggcggctctggtggtggtggatccctcgagatggcccaggtgcagctggtgcaatctg
gggctgaggtgaagaggcctgggtcctcggtgaaggtctcctgcacggcttctggaggcaccttcagcagcgatgctatcagct
gggtgcgacaggcccctggacaagggcttgagtggatgggaggaatcatccctatgtttggtacagcaaactacgcacagaag
ttccagggcagagtcacgattaccgcggacgaatccacgagcacagcctacatggagctgagcagcctgagatctgaggaca
cggccgtgtattactgtgcgcgcgaaggttactactacccgtctgcttacctgggttctgttctgaacgacatctcttctgtttacgat
gaatggggtcaaggtactctggtgaccgtctcctca [SEQ ID NO: 625]
Amino Acid Sequence
NFMLTQPHSVSESPGKTVTISCTRSSGSIASNYVQWYQQRPGSAPTTVIYEDNQRP
SGVPDRFSGSIDSSSNSASLTISGLKTEDEADYYCQSYDSSNSWVFGGGTKLTVL
GSRGGGGSGGGGSGGGGSLEMAQVQLVQSGAEVKRPGSSVKVSCTASGGTFSS
DAISWVRQAPGQGLEWMGGIIPMFGTANYAQKFQGRVTITADESTSTAYMELSS
LRSEDTAVYYCAREGYYYPSAYLGSVLNDISSVYDEWGQGTLVTVSS [SEQ ID
NO: 626]

TABLE 94
ET200-020

DNA Sequence
Cagtctgtcgtgacgcagccgccctcagtgtctgcggccccaggacagaaggtcaccatctcctgctctggaagcacctccaa
cattggaaataatgatgtatcctggtaccagcagctcccaggaacagcccccaaactcctcatttatgacaataataagcgaccct
cagggattcctgaccgattctctggctccaagtctggcacgtcagccaccctgggcatcaccggactccagactggggacgag
gccgattattactgcggaacatgggatagcagcgtgagtgcttcttgggtcttcggcagagggaccaagctgaccgtcctaggtt
ctagaggtggtggtggtagcggcggcggcggctctggtggtggtggatccctcgagatggcccaggtgcagctggtgcagtct
ggagctgaggtgaagaagcctggggcctcagtgaaggtctcctgcaaggcttctggttacacctttaccagctatggtatcagct
gggtgcgacaggcccctggacaagggcttgagtggatgggatggatcagcgcttacaatggtaacacaaactatccacagaa
gctccagggcagagtcaccatgaccacagacccatccacgagcacagcctacatggagctgaggagcctgagatctgacgac
acggccgtgtattactgtgcgcgctctatgacttctttcgattactggggtcaaggtactctggtgaccgtctcctca [SEQ ID
NO: 627]
Amino Acid Sequence
QSVVTQPPSVSAAPGQKVTISCSGSTSNIGNNDVSWYQQLPGTAPKLLIYDNNKR
PSGIPDRFSGSKSGTSATLGITGLQTGDEADYYCGTWDSSVSASWVFGRGTKLTV
LGSRGGGGSGGGGSGGGGSLEMAQVQLVQSGAEVKKPGASVKVSCKASGYTFT
SYGISWVRQAPGQGLEWMGWISAYNGNTNYPQKLQGRVTMTTDPSTSTAYMEL
RSLRSDDTAVYYCARSMTSFDYWGQGTLVTVSS [SEQ ID NO: 628]

TABLE 95
ET200-021

DNA Sequence
Cagtctgtgttgacgcagccgccctcagtgtctgcggccccaggacagaaggtcaccatctcctgctctggaagcaactccaa
cattgggaataattatgtatcctggtatcagcaactcccagggacagcccccaaactcctcatttatgacaataataagcgaccctc
agggattcctgaccgattctctggctccaggtctggcacgtcagccaccctgggcatcaccggactccagactggggacgagg
ccgattattactgcggaacatggaataccactgtgactcctggctatgtcttcggaactgggaccaaggtcaccgtcctaggttcta
gaggtggtggtggtagcggcggcggcggctctggtggtggtggatccctcgagatggccgaagtgcagctggtgcagtctgg
agctgaggtgaagaagcctggggcctcagtgaaggtctcctgcaaggcttctggttacacctttaccagctatggtatcagctgg
gtgcgacaggcccctggacaagggcttgagtggatgggatggatcagcgcttacaatggtaacacaaactatgcacagaagct
ccagggcagagtcaccatgaccacagacacatccacgagcacagcctacatggagctgaggagcctgagatctgacgacac
cgccatgtattactgtgcgcgctctgtttacgacctggatacttggggtcaaggtactctggtgaccgtctcctca [SEQ ID
NO: 629]
Amino Acid Sequence
QSVLTQPPSVSAAPGQKVTISCSGSNSNIGNNYVSWYQQLPGTAPKLLIYDNNKR
PSGIPDRFSGSRSGTSATLGITGLQTGDEADYYCGTWNTTVTPGYVFGTGTKVTV
LGSRGGGGSGGGGSGGGGSLEMAEVQLVQSGAEVKKPGASVKVSCKASGYTFT
SYGISWVRQAPGQGLEWMGWISAYNGNTNYAQKLQGRVTMTTDTSTSTAYME
LRSLRSDDTAMYYCARSVYDLDTWGQGTLVTVSS [SEQ ID NO: 630]

TABLE 96
ET200-022

DNA Sequence
cagtctgtcgtgacgcagccgccctcagtgtctgcggccccaggacagaaggtcaccatctcctgctctggaagcagctccaa
cattgggaataattatgtatcctggtaccagcagctcccaggaacagcccccaaactcctcatttatgacaataataagcgaccct
cagggattcctgaccgattctctggctccaagtctggcacgtcagccaccctgggcatcaccggactccagactggggacgag
gccgattattactgcggaacatgggatagcagcctgggggccccttatgtcttcggaactgggaccaaggtcaccgtcctaggtt
ctagaggtggtggtggtagcggcggcggcggctctggtggtggtggatccctcgagatggccgaggtgcagctggtgcagtc
ttggggaggctcggaacagcctggcaggtccctgagactctcctgtgcagcctctggattcacctttgatgattatgccatgcact
gggtccggcaagctccagggaagggcctggagtgggtctcaggtattagttggaatagcggtagcataggctatgcggactct
gtgaagggccgattcaccatctccagagacaacgccaagaattccctgtatctgcaaatgaacagtctgagagctgaggacacc
gccatgtattactgtgcgcgctaccgtcaggttggttctgcttacgattcttggggtcaaggtactctggtgaccgtctcctca
[SEQ ID NO: 631]
Amino Acid Sequence
QSVVTQPPSVSAAPGQKVTISCSGSSSNIGNNYVSWYQQLPGTAPKLLIYDNNKR
PSGIPDRFSGSKSGTSATLGITGLQTGDEADYYCGTWDSSLGAPYVFGTGTKVTV
LGSRGGGGSGGGGSGGGGSLEMAEVQLVQSWGGSEQPGRSLRLSCAASGFTFD
DYAMHWVRQAPGKGLEWVSGISWNSGSIGYADSVKGRFTISRDNAKNSLYLQM
NSLRAEDTAMYYCARYRQVGSAYDSWGQGTLVTVSS [SEQ ID NO: 632]

TABLE 97
ET200-023

DNA Sequence
ctgcctgtgctgactcagccaccctcggtgtcagtggccccaggaaagacggccaggattacctgtgggggaaacaacattgg
aagtaaaagtgtgcactggtatcagcagaagccaggccaggcccctgtgctggtcgtctatgctgatagcgaccggccctcag
ggatccctgagcgattctctggctccaactctgggaacacggccaccctgaccatcagcagggtcgaagccggggatgaggc
cgactattactgtcaggtgtgggatagtagtagttatcataattatgtcttcggaactgggaccaaggtcaccgtcctaggttctaga
ggtggtggtggtagcggcggcggcggctctggtggtggtggatccctcgagatggccgaggtgcagctggtgcagtctggag
ctgaggtgaagaagcctggggcctcagtgaaggtctcctgcaaggcttctggttacacctttaccagctatggtatcagctgggt
gcgacaggcccctggacaagggcttgagtggatgggatggatcagcgcttacaatggtaacacaaactatgcacagaagctcc
agggcagagtcaccatgaccacagacacatccacgagcacagcctacatggagctgagcagcctgagatctgaggacaccg
ccatgtattactgtgcgcgctactggggtttcggtgtttctgatcgttggggtcaaggtactctggtgaccgtctcctca [SEQ
ID NO: 633]
Amino Acid Sequence
LPVLTQPPSVSVAPGKTARITCGGNNIGSKSVHWYQQKPGQAPVLVVYADSDRP
SGIPERFSGSNSGNTATLTISRVEAGDEADYYCQVWDSSSYHNYVFGTGTKVTVL
GSRGGGGSGGGGSGGGGSLEMAEVQLVQSGAEVKKPGASVKVSCKASGYTFTS
YGISWVRQAPGQGLEWMGWISAYNGNTNYAQKLQGRVTMTTDTSTSTAYMEL
SSLRSEDTAMYYCARYWGFGVSDRWGQGTLVTVSS [SEQ ID NO: 634]

TABLE 98
ET200-024

DNA Sequence
aattttatgctgactcagccccactctgtgtcggagtctccggggaagacggtaaccatctcctgcaccggcagcagtggcagc
attgccagcaactatgtgcagtggtaccagcagcgcccgggcagtgcccccaccactgtgatctatgaggataaccaaagacc
ctctggggtccccgatcggttctctggctccatcgacagctcctccaactctgcctccctcaccatctctggactgaagactgagg
acgaggctgactactactgtcagtcttatgacagcagcaatctttgggtgttcggcggagggaccaagctgaccgtcctaggttct
agaggtggtggtggtagcggcggcggcggctctggtggtggtggatccctcgagatggcccagatgcagctggtgcagtctg
gggctgaggtgaagaagcctgggtcctcggtgaaggtctcctgcaaggcttctggaggcaccttcagcagctatgctatcagct
gggtgcgacaggcccctggacaagggcttgagtggatgggagggatcatccctatctttggtacagcaaactacgcacagaag
ttccagggcagagtcacgattaccgcggacgaatccacgagcacagcctacatggagctgagcagcctgagatctgaggaca
ctgccgtgtattactgtgcgcgctacaactactactactacgattcttggggtcaaggtactctggtgaccgtctcctca [SEQ
ID NO: 635]
Amino Acid Sequence
NFMLTQPHSVSESPGKTVTISCTGSSGSIASNYVQWYQQRPGSAPTTVIYEDNQR
PSGVPDRFSGSIDSSSNSASLTISGLKTEDEADYYCQSYDSSNLWVFGGGTKLTVL
GSRGGGGSGGGGSGGGGSLEMAQMQLVQSGAEVKKPGSSVKVSCKASGGTFSS
YAISWVRQAPGQGLEWMGGIIPIFGTANYAQKFQGRVTITADESTSTAYMELSSL
RSEDTAVYYCARYNYYYYDSWGQGTLVTVSS [SEQ ID NO: 636]

TABLE 99
ET200-025

DNA Sequence
gacatccagatgacccagtctccatcctccctgtctgcatctgtaggagacagagtcaccatcacttgccgggcaagtcagagca
ttagcagctatttaaattggtatcagcagaaaccagggaaagcccctaagctcctgatctatgctgcatccagtttgcaaagtggg
gtcccatcaaggttcagtggcagtggatctgggacagatttcactctcaccatcagcagtctgcaacctgaagattttgcaacttac
tactgtcaacagagttacagtaccccattcactttcggccctgggaccaaagtggatatcaaacgttctagaggtggtggtggtag
cggcggcggcggctctggtggtggtggatccctcgagatggccgaggtgcagctggtgcagtctggggctgaggtgaagaa
gcctgggtcctcggtgaaggtctcctgcaaggcttctggaggcaccttcagcagctatgctatcagctgggtgcgacaggcccc
tggacaagggcttgagtggatgggagggatcatccctatctttggtacagcaaactacgcacagaagttccagggcagagtcac
gattaccgcggacgaatccacgagcacagcctacatggagctgagcagcctgagatctgaggacaccgccatgtattactgtg
cgcgctactggggttacgactcttacgatgaatggggtcaaggtactctggtgaccgtctcctca [SEQ ID NO: 637]
Amino Acid Sequence
DIQMTQSPSSLSASVGDRVTITCRASQSISSYLNWYQQKPGKAPKLLIYAASSLQS
GVPSRFSGSGSGTDFTLTISSLQPEDFATYYCQQSYSTPFTFGPGTKVDIKRSRGG
GGSGGGGSGGGGSLEMAEVQLVQSGAEVKKPGSSVKVSCKASGGTFSSYAISW
VRQAPGQGLEWMGGIIPIFGTANYAQKFQGRVTITADESTSTAYMELSSLRSEDT
AMYYCARYWGYDSYDEWGQGTLVTVSS [SEQ ID NO: 638]

TABLE 100
ET200-026

DNA Sequence
aattttatgctgactcagccccactctgtgtcggagtctccggggaagacggtaaccatctcctgcaccggcagcagtggcagc
attgccagcaactatgtgcagtggtaccagcagcgcccgggcagtgcccccaccactgtgatctatgaggataaccaaagacc
ctctggggtccctgatcggttctctggctccatcgacagctcctccaactctgcctccctcaccatctctggactgaagactgagg
acgaggctgactactactgtcagtcttatgatagcagcaattgggtgttcggcggagggaccaagctgaccgtcctaggttctag
aggtggtggtggtagcggcggcggcggctctggtggtggtggatccctcgagatggccgaggtccagctggtgcagtctggg
gctgaggtgaagaagcctgggtcctcggtgaaggtctcctgcaaggcttctggaggcaccttcagcagctatgctatcagctgg
gtgcgacaggcccctggacaagggcttgagtggatgggagggatcatccctatctttggtacagcaaactacgcacagaagttc
cagggcagagtcacgattaccgcggacgaatccacgagcacagcctacatggagctgagcagcctgagatctgaggacacg
gccgtgtattactgtgcgcgcaacaaccattactacaacgattactggggtcaaggtactctggtgaccgtctcctca [SEQ
ID NO: 639]
Amino Acid Sequence
NFMLTQPHSVSESPGKTVTISCTGSSGSIASNYVQWYQQRPGSAPTTVIYEDNQR
PSGVPDRFSGSIDSSSNSASLTISGLKTEDEADYYCQSYDSSNWVFGGGTKLTVL
GSRGGGGSGGGGSGGGGSLEMAEVQLVQSGAEVKKPGSSVKVSCKASGGTFSS
YAISWVRQAPGQGLEWMGGIIPIFGTANYAQKFQGRVTITADESTSTAYMELSSL
RSEDTAVYYCARNNHYYNDYWGQGTLVTVSS [SEQ ID NO: 640]

TABLE 101
ET200-027

DNA Sequence
cagtctgtgttgacgcagccgccctcagtgtctggggccccagggcagggggtcaccatcccctgcactgggagcagctcca
acatcggggcaggttatgatgtacactggtaccagcagcttccagggacagcccccaaactcctcatctatggtaacaacaatcg
gccctcaggggtccctgaccgcttctctggctccaggtctggctcctcagcctccctggccatcactgggctccaggctgaggat
gaggctgattattactgccagtcctatgacagcagcctgagtgatgtggtattcggcggagggaccaaggtcaccgtcctaggtt
ctagaggtggtggtggtagcggcggcggcggctctggtggtggtggatccctcgagatggccgaggtccagctggtgcagtct
ggggctgaggtgaagaagcctggggctacagtgaaaatctcctgcaaggtttctggatacaccttcaccgactactacatgcact
gggtgcaacaggcccctggaaaagggcttgagtggatgggacttgttgatcctgaagatggtgaaacaatatacgcagagaag
ttccagggcagagtcaccataaccgcggacacgtctacagacacagcctacatggagctgagcagcctgagatctgaggaca
cggccgtgtattactgtgcgcgctactggtcttactctttcgactacctgtacatgccggaaggtaacgattggtggggtcaaggta
ctctggtgaccgtctcctca [SEQ ID NO: 641]
Amino Acid Sequence
QSVLTQPPSVSGAPGQGVTIPCTGSSSNIGAGYDVHWYQQLPGTAPKLLIYGNNN
RPSGVPDRFSGSRSGSSASLAITGLQAEDEADYYCQSYDSSLSDVVFGGGTKVTV
LGSRGGGGSGGGGSGGGGSLEMAEVQLVQSGAEVKKPGATVKISCKVSGYTFT
DYYMHWVQQAPGKGLEWMGLVDPEDGETIYAEKFQGRVTITADTSTDTAYME
LSSLRSEDTAVYYCARYWSYSFDYLYMPEGNDWWGQGTLVTVSS [SEQ ID NO:
642]

TABLE 102
ET200-028

DNA Sequence
cagtctgtgttgactcagccacccgcagcgtctgggacccccggacagagagtcaccatctcttgttctgggggcgtctccaac
atcgggagtggtgctctaaattggtaccagcaactcccaggaacggcccccaaactcctcatctatagttacaatcagcggccct
caggggtctctgaccgattctctggctccaggtctgccacctcagcctccctggccatcagtgggctccagtctgaggatgaggc
tgattattactgtgcaacctgggatgatagtgtgaatggttgggtgttcggcggagggaccaagctgaccgtcctaggttctagag
gtggtggtggtagcggcggcggcggctctggtggtggtggatccctcgagatggcccaggtccagctggtacagtctggagct
gaggtgaagaagcctggggattcagtgaaggtctcctgcaagccttctggttacaattttctcaactatggtatcaactgggtgcg
acaggcccctggacaagggcttgagtggatgggatggattagcacttacaccggtaacacaaactatgcacagaagctgcagg
gcagagtcaccttcaccacagacacatccacgagcacagcctacatggagatgaggagcctgagatctgacgacacggccgt
gtattactgtgcgcgcgacctgtactactacgaaggtgttgattactggggtcaaggtactctggtgaccgtctcctca [SEQ
ID NO: 643]
Amino Acid Sequence
QSVLTQPPAASGTPGQRVTISCSGGVSNIGSGALNWYQQLPGTAPKLLIYSYNQR
PSGVSDRFSGSRSATSASLAISGLQSEDEADYYCATWDDSVNGWVFGGGTKLTV
LGSRGGGGSGGGGSGGGGSLEMAQVQLVQSGAEVKKPGDSVKVSCKPSGYNFL
NYGINWVRQAPGQGLEWMGWISTYTGNTNYAQKLQGRVTFTTDTSTSTAYME
MRSLRSDDTAVYYCARDLYYYEGVDYWGQGTLVTVSS [SEQ ID NO: 644]

TABLE 103
ET200-029

DNA Sequence
caggctgtgctgactcagccaccctcagtgtcagtggccccaggaaagacggccagggttacctgtgggggaaacaacattg
gaagtgaaagtgtgcactggtaccagcagaagccaggccaggcccctgtgttggtcatctattatgataccgaccggccctcag
ggatccctgagcgattctctggctcccactctgggaccacggccaccctgaccatcagcagggtcgaagccggggatgaggc
cgactattactgtcaggtgtgggatagtagtagggatcatgtggtattcggcggagggaccaagctgaccgtcctaggttctaga
ggtggtggtggtagcggcggcggcggctctggtggtggtggatccctcgagatggcccaggtgcagctggtgcagtctgggg
gaggcgtggtccagcctgggaggtccctgagactctcctgtgcggcctctggattcaccttcagtagctatgctatgcactgggt
ccgccaggctccaggcaagggactggagtgggtggcagttatatcatatgatggaagcaataaatactacgcagactccgtga
agggcctattcaccatctccagagacaattccaagaacacgctgtatctgcaaatgaacagcctgagagctgaggacacggcc
gtgtattactgtgcgcgctcttacttcacttctggtttctacgattactggggtcaaggtactctggtgaccgtctcctca [SEQ ID
NO: 645]
Amino Acid Sequence
QAVLTQPPSVSVAPGKTARVTCGGNNIGSESVHWYQQKPGQAPVLVIYYDTDRP
SGIPERFSGSHSGTTATLTISRVEAGDEADYYCQVWDSSRDHVVFGGGTKLTVLG
SRGGGGSGGGGSGGGGSLEMAQVQLVQSGGGVVQPGRSLRLSCAASGFTFSSY
AMHWVRQAPGKGLEWVAVISYDGSNKYYADSVKGLFTISRDNSKNTLYLQMN
SLRAEDTAVYYCARSYFTSGFYDYWGQGTLVTVSS [SEQ ID NO: 646]

TABLE 104
ET200-030

DNA Sequence
cagtctgtcgtgacgcagccgccctcagtgtctggggccccagggcagagggtcaccatctcctgcactgggagcagttccaa
catcggggcaggttatgatgtaaattggtatcagcagtttccaggaacagcccccaaactcctcatctatggtaacagcaatcggc
cctcaggggtccctgaccgattctctggctccaagtctggcacctcagcctccctggccatcactgggctccaggctgaggatg
aggctgattattactgccagtcctatgacagcagcctgagtggctcttatgtcttcggaactgggaccaaggtcaccgtcctaggtt
ctagaggtggtggtggtagcggcggcggcggctctggtggtggtggatccctcgagatggcccagatgcagctggtgcagtct
ggggctgaggtgaagaagcctggggcctcagtgaaggtctcctgcaaggcttccggatacaccctcactgaattatccatgcac
tgggtgcgacaggctcctggaaaagggcttgagtggatgggaggttttgatcctgaagatggtgaaacaatctacgcacagaag
ttccagggcagagtcaccatgaccgaggacacatctacagacacagcctacatggagctgagcagcctgagatctgaggaca
ctgccgtgtattactgtgcgcgcatgtcttctatgtactacgattggggtcaaggtactctggtgaccgtctcctca [SEQ ID
NO: 647]
Amino Acid Sequence
QSVVTQPPSVSGAPGQRVTISCTGSSSNIGAGYDVNWYQQFPGTAPKLLIYGNSN
RPSGVPDRFSGSKSGTSASLAITGLQAEDEADYYCQSYDSSLSGSYVFGTGTKVT
VLGSRGGGGSGGGGSGGGGSLEMAQMQLVQSGAEVKKPGASVKVSCKASGYT
LTELSMHWVRQAPGKGLEWMGGFDPEDGETIYAQKFQGRVTMTEDTSTDTAY
MELSSLRSEDTAVYYCARMSSMYYDWGQGTLVTVSS [SEQ ID NO: 648]

TABLE 105
ET200-031

DNA Sequence
tcctatgtgctgactcagccaccctcagtgtcagtggccccaggaaagacggccaggattacctgtgggggaaacaacattgga
agtaaaagtgtgcactggtaccagcagaagccaggccaggcccctgtgctggtcatctattatgatagcgaccggccctcagg
gatccctgagcgattctctggctccaactctgggaacacggccaccctgaccatcagcagggtcgaagccggggatgaggcc
gactattactgtcaggtgtgggatagtagtagtgattatgtcttcggaactgggaccaaggtcaccgtcctaggttctagaggtggt
ggtggtagcggcggcggcggctctggtggtggtggatccctcgagatggccgaggtgcagctggtggagactgggggaggc
ttggtcaagcctggagggtccctgagactctcctgtgcagcctctggattcaccgtcagtgactactacatgagctggatccgcca
ggctccagggaagggcctggagtggatttcatacattagtggtagtggtaatagcatatactacgcagactctgtgaagggccga
ttcaccatctccagggacaacgccaagaactcactggatctgcaaatgaccagcctgagagccgaggacacggccgtatatta
ctgtgcgcgctctactaaattcgattactggggtcaaggtactctggtgaccgtctcctca [SEQ ID NO: 649]
Amino Acid Sequence
SYVLTQPPSVSVAPGKTARITCGGNNIGSKSVHWYQQKPGQAPVLVIYYDSDRPS
GIPERFSGSNSGNTATLTISRVEAGDEADYYCQVWDSSSDYVFGTGTKVTVLGSR
GGGGSGGGGSGGGGSLEMAEVQLVETGGGLVKPGGSLRLSCAASGFTVSDYYM
SWIRQAPGKGLEWISYISGSGNSIYYADSVKGRFTISRDNAKNSLDLQMTSLRAE
DTAVYYCARSTKFDYWGQGTLVTVSS [SEQ ID NO: 650]

TABLE 106
ET200-032

DNA Sequence
ctgcctgtgctgactcagccaccctcagcgtctgggacccccgggcagagggtcaccatctcttgttctggaagcagctccaac
gtcggaagttacactgtaaactggtaccggcaactcccaggaacggcccccacactcctcatctataataataatcagcggccct
caggggtccctgaccgattctctgactccaagtctggcacctcggcctccctgaccattagtgggctccagcctgaggatgagg
ctgattattattgtgcagcatgggatgacaggctgggtggttatgtcttcggaactgggaccaaggtcaccgtcctaggttctaga
ggtggtggtggtagcggcggcggcggctctggtggtggtggatccctcgagatggccgaggtgcagctggtgcagtctggag
cagaggtgaaaaagccgggggagtctctgaagatctcctgtaagggttctggatacagctttaccaactactggatcggctgggt
gcgccagatgcccgggaaaggcctggagtggatggggatcatctatcctggtgactctgataccagatacagcccgtccttcca
aggccaggtcaccatctcagccgacaagtccatcagcaccgcctacctacagtggagcagcctgaaggcctcggacaccgcc
atgtattactgtgcgcgctctactggttcttctcatatgtctgatgaatggggtcaaggtactctggtgaccgtctcctca [SEQ
ID NO: 651]
Amino Acid Sequence
LPVLTQPPSASGTPGQRVTISCSGSSSNVGSYTVNWYRQLPGTAPTLLIYNNNQRP
SGVPDRFSDSKSGTSASLTISGLQPEDEADYYCAAWDDRLGGYVFGTGTKVTVL
GSRGGGGSGGGGSGGGGSLEMAEVQLVQSGAEVKKPGESLKISCKGSGYSFTNY
WIGWVRQMPGKGLEWMGIIYPGDSDTRYSPSFQGQVTISADKSISTAYLQWSSL
KASDTAMYYCARSTGSSHMSDEWGQGTLVTVSS [SEQ ID NO: 652]

TABLE 107
ET200-033

DNA Sequence
aattttatgctgactcagccccactctgtgtcggagtctccggggaagacggtaaccatctcctgcaccggcagcagtggcagc
attgccagcaactatgtgcagtggtaccagcagcgcccgggcagtgcccccaccactgtgatctatgaggataaccaaagacc
ctctggggtccctgatcggttctctggctccatcgacagctcctccaactctgcctccctcaccatctctggactgaagactgagg
acgaggctgactactactgtcagtcttatgatagcagcaatcattgggtgttcggcggagggaccaagctgaccgtcctaggttct
agaggtggtggtggtagcggcggcggcggctctggtggtggtggatccctcgagatggcccaagtgcagctacagcagtgg
ggcgcaggactgttgaagccttcggagaccctgtccctcacctgcgctgtctatggtgggtccttcagtggttactactggagctg
gatccgccagcccccagggaaggggctggagtggattggggagatcactcatagtggaaggtccaactacaacccgtccctc
aagagtcgagtcaccatatcagtagacacgtccaagaaccagttctccctgaagctgagctctgtgaccgccgcggacacggc
cgtgtattactgtgcgcgctcttctatcatgtctgattactggggtcaaggtactctggtgaccgtctcctca [SEQ ID NO:
653]
Amino Acid Sequence
NFMLTQPHSVSESPGKTVTISCTGSSGSIASNYVQWYQQRPGSAPTTVIYEDNQR
PSGVPDRFSGSIDSSSNSASLTISGLKTEDEADYYCQSYDSSNHWVFGGGTKLTV
LGSRGGGGSGGGGSGGGGSLEMAQVQLQQWGAGLLKPSETLSLTCAVYGGSFS
GYYWSWIRQPPGKGLEWIGEITHSGRSNYNPSLKSRVTISVDTSKNQFSLKLSSVT
AADTAVYYCARSSIMSDYWGQGTLVTVSS [SEQ ID NO: 654]

TABLE 108
ET200-034

DNA Sequence
cagtctgtgttgacgcagccgccctcagtgtctggggccccagggcagagggtcaccatctcctgcactgggagcacctccaa
catcggggcaggttatgatgtacactggtaccagcagcttccaggaacagcccccaaactcctcatcaacaataacaggaatcg
gccctcaggggtccctgaccgattctctggctccaagtctggcacgtcagccaccctgggcatcaccggactccagactgggg
acgaggccgattattactgcggaacatgggatggcagcctgactggtgcagtgttcggcggagggaccaagctgaccgtccta
ggttctagaggtggtggtggtagcggcggcggcggctctggtggtggtggatccctcgagatggccgaggtccagctggtgc
agtctggggctgaggtgaagaagcctgggtcctcggtgaaggtctcatgcaaggcttctggaggcaccttcagcagctatgcta
tcagctgggtgcgacaggcccctggacaagggcttgagtggatgggagggatcatccctatctttggtacagcaaactacgcac
agaagttccagggcagagtcacgattaccgcggacgaatccacgagcacagcctacatggagctgagcagcctgagatctga
ggacacggccgtgtattactgtgcgcgcggttctgctctggaccattacgatcgttggggtcaaggtactctggtgaccgtctcct
ca [SEQ ID NO: 655]
Amino Acid Sequence
QSVLTQPPSVSGAPGQRVTISCTGSTSNIGAGYDVHWYQQLPGTAPKLLINNNRN
RPSGVPDRFSGSKSGTSATLGITGLQTGDEADYYCGTWDGSLTGAVFGGGTKLT
VLGSRGGGGSGGGGSGGGGSLEMAEVQLVQSGAEVKKPGSSVKVSCKASGGTF
SSYAISWVRQAPGQGLEWMGGIIPIFGTANYAQKFQGRVTITADESTSTAYMELS
SLRSEDTAVYYCARGSALDHYDRWGQGTLVTVSS [SEQ ID NO: 656]

TABLE 109
ET200-035

DNA Sequence
aattttatgctgactcagccccactctgtgtcggagtctccggggaagacggtaaccatctcctgcacccgcagcagtggcagca
ttgccagcaactatgtgcagtggtaccagcagcgcccgggcagtgcccccaccactgtgatctatgaggataaccaaagaccct
ctggggtccctgatcggttctctggctccatcgacagctcctccaactctgcctccctcaccatctctggactgaagactgaggac
gaggctgactactactgtcagtcttatgatagcaccaattgggtgttcggcggagggaccaagctgaccgtcctaggttctagag
gtggtggtggtagcggcggcggcggctctggtggtggtggatccctcgagatggcccaggtgcagctggtgcagtctggggc
tgaggtgaagaagcctgggtcctcggtgaaggtctcctgcaaggcttctggaggcaccttcagcagctatgctatcagctgggt
gcgacaggcccctggacaagggcttgagtggatgggagggatcatccctatctttggtacagcaaactacgcacagaagttcc
agggcagagtcacgattaccgcggacgaatccacgagcacagcctacatggagctgagcagcctgagatctgaggacactgc
cgtgtattactgtgcgcgctacaactactacttcaacgattactggggtcaaggtactctggtgaccgtctcctca [SEQ ID
NO: 657]
Amino Acid Sequence
NFMLTQPHSVSESPGKTVTISCTRSSGSIASNYVQWYQQRPGSAPTTVIYEDNQRP
SGVPDRFSGSIDSSSNSASLTISGLKTEDEADYYCQSYDSTNWVFGGGTKLTVLG
SRGGGGSGGGGSGGGGSLEMAQVQLVQSGAEVKKPGSSVKVSCKASGGTFSSY
AISWVRQAPGQGLEWMGGIIPIFGTANYAQKFQGRVTITADESTSTAYMELSSLR
SEDTAVYYCARYNYYFNDYWGQGTLVTVSS [SEQ ID NO: 658]

TABLE 110
ET200-037

DNA Sequence
tcctatgtgctgactcagccaccctcagtgtcagtggccccaggaaagacggccaggattacctgtgggggaaacaacattgga
agtaaaagtgtgcactggtaccagcagaagccaggccaggcccctgtgctggtcatctattatgatagcgaccggccctcagg
gatccctgagcgattctctggctccaactctgggaacacggccaccctgaccatcagcagggtcgaagccggggatgaggcc
gactattactgtcaggtgtgggatagtagtagtgatcatccttatgtcttcggaactgggaccaaggtcaccgtcctaggttctaga
ggtggtggtggtagcggcggcggcggctctggtggtggtggatccctcgagatggcccagatgcagctggtgcagtctggag
ctgaggtgaagaagcctggggcctcagtgaaggtctcctgcaaggcttctggttacacctttaccagctatggtatcagctgggt
gcgacaggcccctggacaagggcttgagtggatgggatggatcagcgcttacaatggtaacacaaactatgcacagaagctcc
agggcagagtcaccatgaccacagacacatccacgagcacagcctacatggagctgaggagcctgagatctgacgacactgc
cgtgtattactgtgcgcgctctatgttcggtgctcatgattcttggggtcaaggtactctggtgaccgtctcctca [SEQ ID
NO: 659]
Amino Acid Sequence
SYVLTQPPSVSVAPGKTARITCGGNNIGSKSVHWYQQKPGQAPVLVIYYDSDRPS
GIPERFSGSNSGNTATLTISRVEAGDEADYYCQVWDSSSDHPYVFGTGTKVTVLG
SRGGGGSGGGGSGGGGSLEMAQMQLVQSGAEVKKPGASVKVSCKASGYTFTS
YGISWVRQAPGQGLEWMGWISAYNGNTNYAQKLQGRVTMTTDTSTSTAYMEL
RSLRSDDTAVYYCARSMFGAHDSWGQGTLVTVSS [SEQ ID NO: 660]

TABLE 111
ET200-038

DNA Sequence
cagtctgtgttgacgcagccgccctcagtgtctggggccccagggcagagggtcaccatctcctgcactgggagcagctccaacatcggggca
ggttttgatgtacactggtaccagctacttccaggaacagcccccaaactcctcatctatgctaacagcaatcggccctcaggggtccctgaccga
ttctctggctccaagtctggcacctcagcctccctggccatcactgggctcctggctgaggatgaggctgattattactgccagtcctatgacagc
agcctgagtggtgtggtattcggcggagggaccaagctgaccgtcctaggttctagaggtggtggtggtagcggcggcggcggctctggtggtg
gtggatccctcgagatggcccaggtgcagctggtgcaatctggggctgaggtgaagaagcctgggtcctcggtgaaggtctcctgcaaggcttc
tggaggcaccttcagcagctatgctatcagctgggtgcgacaggcccctggacaagggcttgagtggatgggagggatcatccctatctttggta
cagcaaactacgcacagaagttccagggcagagtcacgattaccgcggacgaatccacgagcacagcctacatggagctgagcagcctgaga
tctgaggacactgccgtgtattactgtgcgcgcggtgcttctttcgaccgtcatgataactggggtcaaggtactctggtgaccgtctcctca
[SEQ ID NO: 661]
Amino Acid Sequence
QSVLTQPPSVSGAPGQRVTISCTGSSSNIGAGFDVHWYQLLPGTAPKLLIYANSNRPSGVPD
RFSGSKSGTSASLAITGLLAEDEADYYCQSYDSSLSGVVFGGGTKLTVLGSRGGGGSGGGG
SGGGGSLEMAQVQLVQSGAEVKKPGSSVKVSCKASGGTFSSYAISWVRQAPGQGLEWMG
GIIPIFGTANYAQKFQGRVTITADESTSTAYMELSSLRSEDTAVYYCARGASFDRHDNWGQG
TLVTVSS [SEQ ID NO: 662]

TABLE 112
ET200-039

DNA Sequence
aattttatgctgactcagccccactctgtgtcggagtctccggggaagacggtaaccatctcctgcacccgcagcagtggcagcattgccagcaa
ctatgtgcagtggtaccagcagcgcccgggcagttcccccaccactgtgatctatgaggataaccaaagaccctctggggtccctgatcggttct
ctggctccatcgacagctcctccaactctgcctccctcaccatctctggactgaagactgaggacgaggctgactactactgtcagtcttatgata
gcagcaattgggtgttcggcggagggaccaagctgaccgtcctaggttctagaggtggtggtggtagcggcggcggcggctctggtggtggtgg
atccctcgagatggccgaggtccagctggtgcagtctggggctgaggtgaagaagcctgggtcctcggtgaaggtctcctgcaaggcttctgga
ggcaccttcagcagctatgctatcagctgggtgcgacaggcccctggacaagggcttgagtggatgggagggatcatccctatctttggtacagc
aaactacgcacagaagttccagggcagagtcacgattaccgcggacgaatccacgagcacagcctacatggagctgagcagcctgagatctg
aggacacggccgtgtattactgtgcgcgctctaactactactacaacgattactggggtcaaggtactctggtgaccgtctcctca [SEQ ID
NO: 663]
Amino Acid Sequence
NFMLTQPHSVSESPGKTVTISCTRSSGSIASNYVQWYQQRPGSSPTTVIYEDNQRPSGVPDRF
SGSIDSSSNSASLTISGLKTEDEADYYCQSYDSSNWVFGGGTKLTVLGSRGGGGSGGGGSG
GGGSLEMAEVQLVQSGAEVKKPGSSVKVSCKASGGTFSSYAISWVRQAPGQGLEWMGGII
PIFGTANYAQKFQGRVTITADESTSTAYMELSSLRSEDTAVYYCARSNYYYNDYWGQGTL
VTVSS [SEQ ID NO: 664]

TABLE 113
ET200-040

DNA Sequence
cagtctgtgttgacgcagccgccctcagtgtctggggccccagggcagagggtcaccatctcctgcactgggagcagctccaacatcggggca
ggttatgatgtacactggtaccagcagcttccaggaacagcccccaaactcctcatctatggtaacagcaatcggccctcaggggtccctgaccg
attctctggctccaagtctggcacctcagcctccctggccatcactgggctccaggctgaggatgaggctgattattactgccagtcctatgacag
cagcctgagtggttatgtcttcggaactgggaccaaggtcaccgtcctaggttctagaggtggtggtggtagcggcggcggcggctctggtggtg
gtggatccctcgagatggcccaggtgcagctggtgcagtctggggctgaggtgaagaagcctggggcctcagtgaaggtctcctgcaaggtttc
cggatacaccctcactgaattatccatgcactgggtgcgacaggctcctggaaaagggcttgagtggatgggaggttttgatcctgaagatggtg
aaacaatctacgcacagaagttccagggcagagtcaccatgaccgaggacacatctacagacacagcctacatggagctgagcagcctgagat
ctgaggacactgccgtgtattactgtgcgcgctactctggtgtttactacgattggggtcaaggtactctggtgaccgtctcctca [SEQ ID
NO: 665]
Amino Acid Sequence
QSVLTQPPSVSGAPGQRVTISCTGSSSNIGAGYDVHWYQQLPGTAPKLLIYGNSNRPSGVPD
RFSGSKSGTSASLAITGLQAEDEADYYCQSYDSSLSGYVFGTGTKVTVLGSRGGGGSGGGG
SGGGGSLEMAQVQLVQSGAEVKKPGASVKVSCKVSGYTLTELSMHWVRQAPGKGLEWM
GGFDPEDGETIYAQKFQGRVTMTEDTSTDTAYMELSSLRSEDTAVYYCARYSGVYYDWGQ
GTLVTVSS [SEQ ID NO: 666]

TABLE 114
ET200-041

DNA Sequence
aattttatgctgactcagccccactctgtgtcggggtctccggggaagacggtaaccatctcctgcaccggcagcagtggcagcattgccgacaa
ctttgtgcagtggtaccagcagcgcccgggcggtgtccccaccactgtgatctttaatgatgacgaaagaccctctggcgtccctgatcggttctc
tggctccatcgacacctcctccaattctgcctccctcaccatctctggactgaagactgaggacgaggctgactactactgtcagtcttatgataa
taataatcgaggggtgttcggcggagggaccaagctgaccgtcctaggttctagaggtggtggtggtagcggcggcggcggctctggtggtggtgg
atccctcgagatggcccaggtccagctggtgcagtctggggctgaggtgaagaagcctgggtcctcggtgaaggtctcctgcaaggcttctgga
ggcaccttcagcagctatgctatcagctgggtgcgacaggcccctggacaagggcttgagtggatgggatggatgaaccctaacagtggtaaca
caggctatgcacagaagttccagggcagagtcaccatgaccaggaacacctccataagcacagcctacatggagctgagcaacctgagatctg
aggacacggccgtgtattactgtgcgcgctactactcttacggttacgattggggtcaaggtactctggtgaccgtctcctca [SEQ ID NO:
667]
Amino Acid Sequence
NFMLTQPHSVSGSPGKTVTISCTGSSGSIADNFVQWYQQRPGGVPTTVIFNDDERPSGVPDR
FSGSIDTSSNSASLTISGLKTEDEADYYCQSYDNNNRGVFGGGTKLTVLGSRGGGGSGGGGS
GGGGSLEMAQVQLVQSGAEVKKPGSSVKVSCKASGGTFSSYAISWVRQAPGQGLEWMGW
MNPNSGNTGYAQKFQGRVTMTRNTSISTAYMELSNLRSEDTAVYYCARYYSYGYDWGQG
TLVTVSS [SEQ ID NO: 668]

TABLE 115
ET200-042

DNA Sequence
cagtctgtcgtgacgcagccgccctcagtgtctggggccccagggcagacggtcaccatctcctgcactgggggcagctccaacatcgggaca
ggttattttgtaaattggtaccagcaggttccaggaaaagcccccaaactcctcatcctgggtaacaataatcggccctcgggggtccctgaccga
ctctccggctccacgtccggcacctcagcctccctggccatcactgggctccaggctgaggatgagggtacttattactgccagtcctatgacagc
agcctgagtggttatgtcttcggaactgggaccaaggtcaccgtcctaggttctagaggtggtggtggtagcggcggcggcggctctggtggtg
gtggatccctcgagatggcccaggtacagctgcagcagtcaggtccaggactggtgaagccctcgcagaccctctcactcacctgtggcatctc
cggggacagtgtctctaccaacagtgttgcttggcactggatcaggcagtccccatcgagaggccttgagtggctgggaaggacatactacagg
tccaagtggtctaatgactatggagtatctgtgaaaagtcgaatcaccatcatcccagacacatccaagaaccagttctccctgcagctgaactct
gtgactcccgaggacacggctgtgtattactgtgcgcgctcttcttcttggtaccagatcttcgattactggggtcaaggtactctggtgaccgtc
tcctca [SEQ ID NO: 669]
Amino Acid Sequence
QSVVTQPPSVSGAPGQTVTISCTGGSSNIGTGYFVNWYQQVPGKAPKLLILGNNNRPSGVPD
RLSGSTSGTSASLAITGLQAEDEGTYYCQSYDSSLSGYVFGTGTKVTVLGSRGGGGSGGGG
SGGGGSLEMAQVQLQQSGPGLVKPSQTLSLTCGISGDSVSTNSVAWHWIRQSPSRGLEWLG
RTYYRSKWSNDYGVSVKSRITIIPDTSKNQFSLQLNSVTPEDTAVYYCARSSSWYQIFDYWG
QGTLVTVSS [SEQ ID NO: 670]

TABLE 116
ET200-043

DNA Sequence
aattttatgctgactcagccccactctgtgtcggagtctccggggaagacggtaaccatctcctgcaccggcagcagcgacagcatagccaacaa
ctatgttcagtggtaccagcagcgcccgggcagtgcccccaccaatgtgatctacgaagatgtccaaagaccctctggggtccctgatcggttct
ctgggtccatcgacagctcctccaactctgcctccctcaccatctctggactgaagactgaggacgaggctgtctactattgtcagtcttatcata
gcgacaatcgttgggtgttcggcggcgggaccaagctgaccgtcctaggttctagaggtggtggtggtagcggcggcggcggctctggtggtggt
ggatccctcgagatggcccaggtgcagctggtggagtctgggggaggcttggtacagcctggggggtccctgagactctcctgtgcagcctctg
gattcacctttagcagctatgccatgagctgggtccgccaggctccagggaaggggctggagtgggtctcagctattagtggtagtggtggtagc
acatactacgcagactccgtgaagggccggttcaccatctccagagacaattccaagaacacgctgtatctgcaaatgaacagcctgagagccgag
gacacggccgtatattactgtgcgcgctctggtgcttactgggactactctgtttacgatgaatggggtcaaggtactctggtgaccgtctcctca
[SEQ ID NO: 671]
Amino Acid Sequence
NFMLTQPHSVSESPGKTVTISCTGSSDSIANNYVQWYQQRPGSAPTNVIYEDVQRPSGVPDR
FSGSIDSSSNSASLTISGLKTEDEAVYYCQSYHSDNRWVFGGGTKLTVLGSRGGGGSGGGGS
GGGGSLEMAQVQLVESGGGLVQPGGSLRLSCAASGFTFSSYAMSWVRQAPGKGLEWVSAI
SGSGGSTYYADSVKGRFTISRDNSKNTLYLQMNSLRAEDTAVYYCARSGAYWDYSVYDE
WGQGTLVTVSS [SEQ ID NO: 672]

TABLE 117
ET200-044

DNA Sequence
cagtctgtgttgactcagccaccctcagtgtccgtgtccccaggacagacagccaccatcgcctgttctggacataaattgggggataaatatgct
tcctggtatcagcagaagtcgggccagtcccctgtgttgatcatctatcaggataataagcggccctcagggattcctgagcgattctctggctcc
aactctgggaacacagccactctgaccatcagcgggacccaggctctggatgaggctgactattattgtcaggcgtgggacagtagtacttatgtg
gcattcggcggagggaccaagctgaccgtcctaggttctagaggtggtggtggtagcggcggcggcggctctggtggtggtggatccctcgaga
tggcccaggtgcagctgcaggagtccggcccaggactggtgaagccttcggagaccctgtccctcacctgcgttgtctctggtggctccatcag
cagtagtaactggtggagctgggtccgccagcccccagggaaggggctggagtggattggggaaatctatcatagtgggagccccaactacaa
cccatccctcaagagtcgagtcaccatatcagtagacaagtccaagaaccagttctccctgaagctgagctctgtgaccgccgcggacacggcc
gtgtattactgtgcgcgcatgactactcatactttcggttacgatgcttggggtcaaggtactctggtgaccgtctcctca [SEQ ID NO:
673]
Amino Acid Sequence
QSVLTQPPSVSVSPGQTATIACSGHKLGDKYASWYQQKSGQSPVLIIYQDNKRPSGIPERFSG
SNSGNTATLTISGTQALDEADYYCQAWDSSTYVAFGGGTKLTVLGSRGGGGSGGGGSGGG
GSLEMAQVQLQESGPGLVKPSETLSLTCVVSGGSISSSNWWSWVRQPPGKGLEWIGEIYHS
GSPNYNPSLKSRVTISVDKSKNQFSLKLSSVTAADTAVYYCARMTTHTFGYDAWGQGTLV
TVSS [SEQ ID NO: 674]

TABLE 118
ET200-045

DNA Sequence
cagcctgtgctgactcagccaccctcagtgtcagtggccccaggaaagacggccacgattacttgtgggggaaacaacattggaagtgaaagtg
tgcactggtaccaccagaagccaggccaggcccctgtgttggtcatctatgatgatgccggccggccctcagggatccctgagcgattcactgg
ctccaactctgggaacacggccaccctgaccatcagcagggtcgaagccggggatgaggccgactattactgtcaggtgtgggacagaaatag
tgctcagtttgtcttcggacctgggaccaaggtcaccgtcctaggttctagaggtggtggtggtagcggcggcggcggctctggtggtggtggat
ccctcgagatggccgaggtccagctggtgcagtctggagctgaggtgaagaagcctggggcctcagtgaaggtctcctgcaaggcttctggtta
cacctttaccagctatggtatcagctgggtgcgacaggcccctggacaagggcttgagtggatgggatggatcagcgcttacaatggtaacacaa
actatgcacagaagctccagggcagagtcaccatgaccacagacacatccacgagcacagcctacatggagctgaggagcctgagatctgac
gacacggccgtgtattactgtgcgcgcggtgttcatctggattggtggggtcaaggtactctggtgaccgtctcctca [SEQ ID NO: 675]
Amino Acid Sequence
QPVLTQPPSVSVAPGKTATITCGGNNIGSESVHWYHQKPGQAPVLVIYDDAGRPSGIPERFT
GSNSGNTATLTISRVEAGDEADYYCQVWDRNSAQFVFGPGTKVTVLGSRGGGGSGGGGSG
GGGSLEMAEVQLVQSGAEVKKPGASVKVSCKASGYTFTSYGISWVRQAPGQGLEWMGWI
SAYNGNTNYAQKLQGRVTMTTDTSTSTAYMELRSLRSDDTAVYYCARGVHLDWWGQGT
LVTVSS [SEQ ID NO: 676]

TABLE 119
ET200-069

DNA Sequence
cagtctgtcgtgacgcagccaccctcagcgtctgggacccccgggcagagggtcaccatctcttgttctggaagcagctccaacatcggaagta
attatgtatactggtaccagcagctcccaggaacggcccccaaactcctcatctatagtaataatcagcggccctcaggggtccctgaccgattct
ctggctccaagtctggcacctcagcctccctggccatcagtgggctccggtccgaggatgaggctgattattactgtgcagcatgggatgacagcc
tgagtggttatgtcttcggaactgggaccaagctgaccgtcctaggttctagaggtggtggtggtagcggcggcggcggctctggtggtggtgga
tccctcgagatggcccaggtgcagctacagcagtggggcgcaggactgttgaagccttcggagaccctgtccctcacctgcgctgtctatggtg
ggtccttcagtggttactactggagctggatccgccagcccccagggaaggggctggagtggattggggaaatcaatcatagtggaagcacca
actacaacccgtccctcaagagtcgagtcaccatatcagtagacacgtccaagaaccagttctccctgaagctgagctctgtgaccgccgcggac
acggccgtgtattactgtgcgcgcctgtacgaaggtggttaccatggttggggttcttggctgtcttctgattcttggggtcaaggtactctggtg
accgtctcctca [SEQ ID NO: 677]
Amino Acid Sequence
QSVVTQPPSASGTPGQRVTISCSGSSSNIGSNYVYWYQQLPGTAPKLLIYSNNQRPSGVPDRF
SGSKSGTSASLAISGLRSEDEADYYCAAWDDSLSGYVFGTGTKLTVLGSRGGGGSGGGGSG
GGGSLEMAQVQLQQWGAGLLKPSETLSLTCAVYGGSFSGYYWSWIRQPPGKGLEWIGEIN
HSGSTNYNPSLKSRVTISVDTSKNQFSLKLSSVTAADTAVYYCARLYEGGYHGWGSWLSSD
SWGQGTLVTVSS [SEQ ID NO: 678]

TABLE 120
ET200-078

DNA Sequence
cagtctgtgttgactcagccaccctcagcgtctgggacccccgggcagagggtcaccatctcttgttctggaagcagctccaacatcggaagtaa
tactgtaaactggtaccagcagctcccaggaacggcccccaaactcctcatctatagtaataatcagcggccctcaggggtccctgaccgattctc
tggctccaagtctggcacctcagcctccctggccatcagtgggctccagtctgaggatgaggctgattattactgtgcagcatgggatgacagcct
gaatggttattgggtgttcggcggagggaccaagctgaccgtcctaggttctagaggtggtggtggtagcggcggcggcggctctggtggtggt
ggatccctcgagatggcccaggtgcagctacagcagtggggcgcaggactgttgaagccttcggagaccctgtccctcacctgcgctgtctatg
gtgggtccttcagtggttactactggagctggatccgccagcccccagggaaggggctggagtggattggggaaatcaatcatagtggaagcac
caactacaacccgtccctcaagagtcgagtcaccatatcagtagacacgtccaagaaccagttctccctgaagctgagctctgtgaccgccgcgg
acacggctgtgtattactgtgcgcgcgaaggggcatttgatgcttttgatatctggggccaagggacaatggtcaccgtctcttca [SEQ ID
NO: 679]
Amino Acid Sequence
QSVLTQPPSASGTPGQRVTISCSGSSSNIGSNTVNWYQQLPGTAPKLLIYSNNQRPSGVPDRF
SGSKSGTSASLAISGLQSEDEADYYCAAWDDSLNGYWVFGGGTKLTVLGSRGGGGSGGGG
SGGGGSLEMAQVQLQQWGAGLLKPSETLSLTCAVYGGSFSGYYWSWIRQPPGKGLEWIGE
INHSGSTNYNPSLKSRVTISVDTSKNQFSLKLSSVTAADTAVYYCAREGAFDAFDIWGQGT
MVTVSS [SEQ ID NO: 680]

TABLE 121
ET200-079

DNA Sequence
tcctatgagctgactcagccaccctcagcgtctgggacccccgggcagagggtcaccatctcttgttctggaagcagctccaacatcggaagtaa
ttatgtatactggtaccagcagctcccaggaacggcccccaaactcttcatctataggaataatcagcggccctcaggggtccctgaccgattctc
tggctccaagtctggcacctcagcctccctggccatcagtgggctccggtccgaggatgaggctgattattactgtgcagcatgggatgacagcct
gagtggttatctcttcggaactgggaccaaggtcaccgtcctaggttctagaggtggtggtggtagcggcggcggcggctctggtggtggtggat
ccctcgagatggccgaggtgcagctggtggagtctgggggaggcttggtacagcctggcaggtccctgagactctcctgtgcagcctctggatt
cacctttgatgattatgccatgcactgggtccggcaagctccagggaagggcctggagtgggtctcaggtattagttggaatagtggtagcatagg
ctatgcggactctgtgaagggccgattcaccatctccagagacaacgccaagaactccctgtatctgcaaatgaacagtctgagagctgaggaca
cggccttgtattactgtgcaaatggcgactccaactactactacggtatggacgtctggggccaagggaccacggtcaccgtctcctca [SEQ
ID NO: 681]
Amino Acid Sequence
SYELTQPPSASGTPGQRVTISCSGSSSNIGSNYVYWYQQLPGTAPKLFIYRNNQRPSGVPDRF
SGSKSGTSASLAISGLRSEDEADYYCAAWDDSLSGYLFGTGTKVTVLGSRGGGGSGGGGSG
GGGSLEMAEVQLVESGGGLVQPGRSLRLSCAASGFTFDDYAMHWVRQAPGKGLEWVSGIS
WNSGSIGYADSVKGRFTISRDNAKNSLYLQMNSLRAEDTALYYCANGDSNYYYGMDVWG
QGTTVTVSS [SEQ ID NO: 682]

TABLE 122
ET200-081

DNA Sequence
cagtctgccctgactcagcctgcctccgtgtccgggtctcctggacagtcgatcaccatctcctgcactggaaccagcagtgacattggtggttat
aactatgtctcctggtaccaacaacacccaggcaaagcccccaaactcatgatttatgatgtcagtaatcggccctcaggggtttctaatcgcttc
tctggctccaagtctggcaacacggcctccctgaccatctctgggctccaggctgaggacgaggctgattattactgcatctcatatacacgcacc
tggaacccctatgtcttcgggagtgggaccaaggtcaccgtcctaggttctagaggtggtggtggtagcggcggcggcggctctggtggtggtgga
tccctcgagatggccgaggtgcagctggtgcagtctgggggaggcgtggtacagcctggggggtccctgagactctcctgtgcagcctctggatt
cacctttgatgattatgccatgcactgggtccgtcaagctccagggaagggtctggagtgggtctctcttattagtggggatggtggtagcacata
ctatgcagactctgtgaagggccgattcaccatctccagagacaacagcaaaaactccctgtatctgcaaatgaacagtctgagaactgaggacac
cgccttgtattactgtgcaaaagatcgggcagcagctggctactactactacggtatggacgtctggggccaagggaccacggtcaccgtctcct
ca [SEQ ID NO: 683]
Amino Acid Sequence
QSALTQPASVSGSPGQSITISCTGTSSDIGGYNYVSWYQQHPGKAPKLMIYDVSNRPSGVSN
RFSGSKSGNTASLTISGLQAEDEADYYCISYTRTWNPYVFGSGTKVTVLGSRGGGGSGGGG
SGGGGSLEMAEVQLVQSGGGVVQPGGSLRLSCAASGFTFDDYAMHWVRQAPGKGLEWVS
LISGDGGSTYYADSVKGRFTISRDNSKNSLYLQMNSLRTEDTALYYCAKDRAAAGYYYYG
MDVWGQGTTVTVSS [SEQ ID NO: 684]

TABLE 123
ET200-097

DNA Sequence
ctgcctgtgctgactcagccaccctcagtgtccgtgtccccaggacagacagccatcatcacctgctctggagataaattgggggaaaaatatgtt
tcctggtatcagcagaagccaggccagtcccctgtactggtcatcgatcaagataccaggaggccctcagggatccctgagcgattctctggctc
caactctgggaccacagccactctgaccatcagcgggacccaggctatggatgaggctgactattactgtcaggcgtgggacaggggtgtggta
ttcggcggagggaccaagctgaccgtcctaggttctagaggtggtggtggtagcggcggcggcggctctggtggtggtggatccctcgagatg
gccgaggtgcagctggtggagtctgggggagacttggtacagcctggcaggtccctgagactctcctgtgcagcctctggattcacctttaatgat
tatgccatgcactgggtccggcaagctccagggaagggcctggagtgggtctcaggtattagttggagtggtaataacataggctatgcggactc
tgtgaagggccgattcaccatctccagagacaacgccaagaactccctgtatctgcaaatgaacagtctgagagctgaggacacggccttgtatt
actgtgcaaaagatagtatacggtatggcatcacctggggaggttttgactactggggccagggaaccctggtcaccgtctcctca [SEQ ID
NO: 685]
Amino Acid Sequence
LPVLTQPPSVSVSPGQTAIITCSGDKLGEKYVSWYQQKPGQSPVLVIDQDTRRPSGIPERFSG
SNSGTTATLTISGTQAMDEADYYCQAWDRGVVFGGGTKLTVLGSRGGGGSGGGGSGGGG
SLEMAEVQLVESGGDLVQPGRSLRLSCAASGFTFNDYAMHWVRQAPGKGLEWVSGISWS
GNNIGYADSVKGRFTISRDNAKNSLYLQMNSLRAEDTALYYCAKDSIRYGITWGGFDYWG
QGTLVTVSS [SEQ ID NO: 686]

TABLE 124
ET200-098

DNA Sequence
cagcctgtgctgactcagccaccctcggtgtccaagggcttgagacagaccgccacactcacctgcactgggaacagcaacaatgttggcaac
ctaggagtagcttggctgcagcagcaccagggccaccctcccaaactcctatcctacaggaataacaaccggccctcagggatctcagagagat
tatctgcatccaggtcaggaaacacagcctccctgaccattactggactccagcctgaggacgaggctgactattactgctcagcatgggacagt
agcctcagtgcttgggtgttcggcggagggaccaagctgaccgtcctaggttctagaggtggtggtggtagcggcggcggcggctctggtggt
ggtggatccctcgagatggccgaggtgcagctggtggagtctgggggagtcgtggtacagcctggggggtccctgagactctcctgtgcagcctc
tggattcacctttgatgattatgccatgcactgggtccgtcaagctccggggaagggtctggagtgggtctctcttattaattgggatggtggtag
cacctactatgcagactctgtgaagggtcgattcaccatctccagagacaacagcaaaaactccctgtatctgcaaatgaacagtctgagagctga
ggacaccgccttgtattactgtgcaaaagggatgggcctgagggcgtttgactactggggccagggaaccctggtcaccgtctcctca [SEQ
ID NO: 687]
Amino Acid Sequence
QPVLTQPPSVSKGLRQTATLTCTGNSNNVGNLGVAWLQQHQGHPPKLLSYRNNNRPSGISE
RLSASRSGNTASLTITGLQPEDEADYYCSAWDSSLSAWVFGGGTKLTVLGSRGGGGSGGGG
SGGGGSLEMAEVQLVESGGVVVQPGGSLRLSCAASGFTFDDYAMHWVRQAPGKGLEWVS
LINWDGGSTYYADSVKGRFTISRDNSKNSLYLQMNSLRAEDTALYYCAKGMGLRAFDYW
GQGTLVTVSS [SEQ ID NO: 688]

TABLE 125
ET200-099

DNA Sequence
cagtctgtgttgactcagccaccctcagcgtctgggacccccgggcagagggtcaccatctcctgttctggaagcagctccaacatcggaagtaa
tactgtaaactggtaccagcagctcccaggaacggcccccaaactcctcatctatagtaatgatcagcggccctcaggggtccctgaccgattctc
tggctccaagtccggcacctcagcctccctggccatcagtgggctccagtctgaggatgaggctgattattactgtgcttcatgggatgacagcct
gaatggccgttatgtcttcggaactgggaccaaggtcaccgtcctaggttctagaggtggtggtggtagcggcggcggcggctctggtggtggt
ggatccctcgagatggcccaggtccagctggtacagtctggggctgaggtgaggaagcctggggcctcagtgaaggtttcctgcaagacttctg
gatacaccttcagttggtatgctatacattgggtgcgccaggcccccggacaaaggcttgagtggatgggatggatcaacgctggcaatggaaa
cacaaaatattcacagaaatttcagggcagagtcagtcttaccagggacacatccgcgagcacagcctacatggagctgagcagcctgagatct
gatgacacggctgtgtattactgtgcgagacccgataattatggttcgggtggggatgtttttgatatctggggccaagggacaatggtcaccgtc
tcttca [SEQ ID NO: 689]
Amino Acid Sequence
QSVLTQPPSASGTPGQRVTISCSGSSSNIGSNTVNWYQQLPGTAPKLLIYSNDQRPSGVPDRF
SGSKSGTSASLAISGLQSEDEADYYCASWDDSLNGRYVFGTGTKVTVLGSRGGGGSGGGGS
GGGGSLEMAQVQLVQSGAEVRKPGASVKVSCKTSGYTFSWYAIHWVRQAPGQRLEWMG
WINAGNGNTKYSQKFQGRVSLTRDTSASTAYMELSSLRSDDTAVYYCARPDNYGSGGDVF
DIWGQGTMVTVSS [SEQ ID NO: 690]

TABLE 126
ET200-100

DNA Sequence
aattttatgctgactcagccccactctgtgtcggagtctccggggaagacggtaaccatctcctgcacccgcagcagtggcagca
ttgccagcaactttgtgcagtggtaccagcagcgcccgggcagtgcccccacccctatgatctatgaggataacaacagacccc
ctggggtccctgatcggttctctgcctccgtcgacagctcctccaactctgcctccctcaccatctctggactgaagactgaggac
gaggctgactactactgtcagtcttatgataccagcaatgtggtattcggcggggggaccaagctgaccgtcctaggttctagag
gtggtggtggtagcggcggcggcggctctggtggtggtggatccctcgagatggccgaggtgcagctggtggagtctggggg
aggcttggtacagcctggagggtccctgagactctcctgtgcagcctctggattcaccttcagtagttatgaaatgaactgggtcc
gccaggctccagggaaggggctggagtgggtttcatacattagtagtagtggtagtaccatatactacgcagactctgtgaagg
gccgattcaccatctccagagacaacgccaagaactcactgtatctgcaaatgaacagcctgagagccgaggacacggctgttt
attactgtgcacgctgggactacggtatggacgtctggggccaagggaccacggtcaccgtctcctca [SEQ ID NO:
691]
Amino Acid Sequence
NFMLTQPHSVSESPGKTVTISCTRSSGSIASNFVQWYQQRPGSAPTPMIYEDNNRP
PGVPDRFSASVDSSSNSASLTISGLKTEDEADYYCQSYDTSNVVFGGGTKLTVLG
SRGGGGSGGGGSGGGGSLEMAEVQLVESGGGLVQPGGSLRLSCAASGFTFSSYE
MNWVRQAPGKGLEWVSYISSSGSTIYYADSVKGRFTISRDNAKNSLYLQMNSLR
AEDTAVYYCARWDYGMDVWGQGTTVTVSS [SEQ ID NO: 692]

TABLE 127
ET200-101

DNA Sequence
caggctgtgctgactcagccaccctcagcgtctggggcccccgggcagagggtcaccgtctcttgttctggaagcaactccaac
atcggaagtaactacgttaactggtaccagcagttcccaggaacggcccccaaactcctcatgtatagtagtagtcagcggccct
caggggtccctgaccgattctctggctccaagtctggcacctcagcctccctggccatcagtgggctccactctgaggatgagg
ctgattattactgtgctacatgggatgacagcctgaatgcttgggtgttcggcggagggaccaagctgaccgtcctaggttctaga
ggtggtggtggtagcggcggcggcggctctggtggtggtggatccctcgagatggccgaggtccagctggtgcagtctgggg
ctgaggtgaggaagcctggggcctcagtgaaggtttcctgcaagacttctggatacaccttcacttggtatgctatacattgggtg
cgccaggcccccggacaaaggcttgagtggatgggatggatcaacgctggcagtggaaacacaaaatattcacagaaatttca
gggcagagtcacccttaccagggacacatccgcgagcacagcgtacatggagctgagcagcctgagatctgatgacacggct
gtgtattactgtgcgagacccaataactatggttcgggtggggatgtttttgatatctggggccaagggacaatggtcaccgtctct
tca [SEQ ID NO: 693]
Amino Acid Sequence
QAVLTQPPSASGAPGQRVTVSCSGSNSNIGSNYVNWYQQFPGTAPKLLMYSSSQ
RPSGVPDRFSGSKSGTSASLAISGLHSEDEADYYCATWDDSLNAWVFGGGTKLT
VLGSRGGGGSGGGGSGGGGSLEMAEVQLVQSGAEVRKPGASVKVSCKTSGYTF
TWYAIHWVRQAPGQRLEWMGWINAGSGNTKYSQKFQGRVTLTRDTSASTAYM
ELSSLRSDDTAVYYCARPNNYGSGGDVFDIWGQGTMVTVSS [SEQ ID NO: 694]

TABLE 128
ET200-102

DNA Sequence
cagtctgtcgtgacgcagccgccctcagtgtctgcggccccaggacagaaggtcaccatctcctgctctggaagcagctccaa
cattgggaataattatgtatcctggtaccagcagctcccaggaacagcccccaaactcctcatttatgacaataataagcgaccct
cagggattcctgaccgattctctggctccaagtctggcacgtcagccaccctgggcatcaccggactccagactggggacgag
gccgattattactgcggaacatgggatagcagcctgagtgcttatgtcttcggaactgggaccaaggtcaccgtcctaggttctag
aggtggtggtggtagcggcggcggcggctctggtggtggtggatccctcgagatggcccaggtccagctggtgcagtctggg
gctgaggtgaagaagcctggggcctcagtgaaagtttcctgcaaggcttctggatacaccttcacgaactatgctctgcattgggt
gcgccaggcccccggacaagggcttgagtggatggcatggatcaacggtggcaatggtaacacaaaatattcacagaacttcc
agggcagagtcaccattaccagggacacatccgcgagcacagcctatatggagctgagcagcctgagatctgaagacacggc
tgtgtattactgtgcgaaaccggaggaaacagctggaacaatccactttgactactggggccagggaaccccggtcaccgtctc
ctca [SEQ ID NO: 695]
Amino Acid Sequence
QSVVTQPPSVSAAPGQKVTISCSGSSSNIGNNYVSWYQQLPGTAPKLLIYDNNKR
PSGIPDRFSGSKSGTSATLGITGLQTGDEADYYCGTWDSSLSAYVFGTGTKVTVL
GSRGGGGSGGGGSGGGGSLEMAQVQLVQSGAEVKKPGASVKVSCKASGYTFT
NYALHWVRQAPGQGLEWMAWINGGNGNTKYSQNFQGRVTITRDTSASTAYME
LSSLRSEDTAVYYCAKPEETAGTIHFDYWGQGTPVTVSS [SEQ ID NO: 696]

TABLE 129
ET200-103

DNA Sequence
caggctgtgctgactcagccccactctgtgtcggagtctccggggaagacggtaaccatctcctgcacccgcagcagtggcag
cattgccagcaactatgtgcagtggtaccagcagcgcccgggcagtgcccccaccactgtgatctatgaggataaccaaagac
cctctggggtccctgatcggttctctggctccatcgacagctcctccaactctgcctccctcaccatctctggactgaagactgag
gacgaggctgactactactgtcagtcttatgatagcaccatcacggtgttcggcggagggaccaagctgaccgtcctaggttcta
gaggtggtggtggtagcggcggcggcggctctggtggtggtggatccctcgagatggcccaggtccagctggtacagtctgg
ggctgaggtgaagaagcctgggtcctcggtgaaggtctcctgcaaggcttctggaggcaccttcagcagctatgctatcagctg
ggtgcgacaggcccctggacaagggcttgagtggatgggagggatcatccctatctttggtacagcaaactacgcacagaagtt
ccagggcagagtcacgattaccgcggacgaatccacgagcacagcctacatggagctgagcagcctgagatctgaggacac
ggccgtgtattactgtgcgggggagggttactatgatagtagtggttattccaacggtgatgcttttgatatctggggccaaggga
caatggtcaccgtctcttca [SEQ ID NO: 697]
Amino Acid Sequence
QAVLTQPHSVSESPGKTVTISCTRSSGSIASNYVQWYQQRPGSAPTTVIYEDNQRP
SGVPDRFSGSIDSSSNSASLTISGLKTEDEADYYCQSYDSTITVFGGGTKLTVLGS
RGGGGSGGGGSGGGGSLEMAQVQLVQSGAEVKKPGSSVKVSCKASGGTFSSYA
ISWVRQAPGQGLEWMGGIIPIFGTANYAQKFQGRVTITADESTSTAYMELSSLRS
EDTAVYYCAGEGYYDSSGYSNGDAFDIWGQGTMVTVSS [SEQ ID NO: 698]

TABLE 130
ET200-104

DNA Sequence
aattttatgctgactcagccccactctgtgtcggagtctccggggaagacggtaaccatctcctgcacccgcagcagtggcagca
ttgccagcaactatgtgcagtggtaccagcagcgcccgggcagtgcccccaccactgtgatctatgaggataaccaaagaccct
ctggggtccctgatcggttctctggctccatcgacagctcctccaactctgcctccctcaccatctctggactgaagactgaggac
gaggctgactactactgtcagtcttatgatagcagcaatgtggtattcggcggagggaccaaggtcaccgtcctaggttctagag
gtggtggtggtagcggcggcggcggctctggtggtggtggatccctcgagatggccgaggtgcagctggtggagtctggggg
aggcttggtacagcctggagggtccctgagactctcctgtgcagcctctggattcaccttcagtagttatgaaatgaactgggtcc
gccaggctccagggaaggggctggagtgggtttcatacattagtagtagtggtagtaccatatactacgcagactctgtgaagg
gccgattcaccatctccagagacaacgccaagaactcactgtatctgcaaatgaacagcctgagagccgaggacacggctgttt
attactgtgcacgctgggactacggtatggacgtctggggccaagggaccacggtcaccgtctcctca [SEQ ID NO:
699]
Amino Acid Sequence
NFMLTQPHSVSESPGKTVTISCTRSSGSIASNYVQWYQQRPGSAPTTVIYEDNQRP
SGVPDRFSGSIDSSSNSASLTISGLKTEDEADYYCQSYDSSNVVFGGGTKVTVLGS
RGGGGSGGGGSGGGGSLEMAEVQLVESGGGLVQPGGSLRLSCAASGFTFSSYE
MNWVRQAPGKGLEWVSYISSSGSTIYYADSVKGRFTISRDNAKNSLYLQMNSLR
AEDTAVYYCARWDYGMDVWGQGTTVTVSS [SEQ ID NO: 700]

TABLE 131
ET200-105

DNA Sequence
tcctatgtgctgactcagccaccctcagtgtccgtgtccccaggacagacagccagcatcacctgctctggagatagattgacga
ataaatatgtttcctggtatcaacagaagccaggccagtcccctgtgttggtcatctatgaggatgccaagcggccctcagggatc
cctgcgcgattctctggctccaactctgggaacacagccactctgaccatcagcgggacccaggctatggatgagtctgaatatt
actgtcaggcgtgggacagcagtgtggtggtttttggcggagggaccaagctgaccgtcctaggttctagaggtggtggtggta
gcggcggcggcggctctggtggtggtggatccctcgagatggccgaggtgcagctggtggagtctgggggaggcttggtaca
gcctggcaggtccctgagactctcctgtgcagcctctggatttacctttgatgattatgccatgcactgggtccggcaagctccag
ggaagggcctggagtgggtctcaggtattagttggaatagtggtagtataggctatgcggactctgtgaagggccgattcaccat
ctccagagacaacgccaagaactccctgtatctgcaaatgaacagtctgagagatgaggacacggccttgtattactgtgcaaaa
gaccgaggggggggagttatcgttaaggatgcttttgatatctggggccaagggacaatggtcaccgtctcttca [SEQ ID
NO: 701]
Amino Acid Sequence
SYVLTQPPSVSVSPGQTASITCSGDRLTNKYVSWYQQKPGQSPVLVIYEDAKRPS
GIPARFSGSNSGNTATLTISGTQAMDESEYYCQAWDSSVVVFGGGTKLTVLGSR
GGGGSGGGGSGGGGSLEMAEVQLVESGGGLVQPGRSLRLSCAASGFTFDDYAM
HWVRQAPGKGLEWVSGISWNSGSIGYADSVKGRFTISRDNAKNSLYLQMNSLR
DEDTALYYCAKDRGGGVIVKDAFDIWGQGTMVTVSS [SEQ ID NO: 702]

TABLE 132
ET200-106

DNA Sequence
tcctatgagctgactcagccacccgcagcgtctgggacccccggacagagagtcaccatctcttgttctgggggcgtctccaac
atcgggagtggtgctctaaattggtaccagcaactcccaggaacggcccccaaactcctcatctatagttacaatcagcggccct
caggggtctctgaccgattctctggctccaggtctgccacctcagcctccctggccatcagtgggctccagtctgaggatgaggc
tgattattactgtgcaacctgggatgatagtgtgaatggttgggtgttcggcggagggaccaagctgaccgtcctaggttctagag
gtggtggtggtagcggcggcggcggctctggtggtggtggatccctcgagatggccgaggtgcagctggtggagtctggagc
tgaggtgaagaagcctggggattcagtgaaggtctcctgcaagccttctggttacaattttctcaactatggtatcaactgggtgcg
acaggcccctggacaagggcttgagtggatgggatggattagcacttacaccggtaacacaaactatgcacagaagctgcagg
gcagagtcaccttcaccacagacacatccacgagcacagcctacatggagatgaggagcctgagatctgacgacacggccgt
gtattactgtgcgcgccagcagggtggtggttggtacgatgtttggggtcaaggtactctggtcaccgtctcctca [SEQ ID
NO: 703]
Amino Acid Sequence
SYELTQPPAASGTPGQRVTISCSGGVSNIGSGALNWYQQLPGTAPKLLIYSYNQR
PSGVSDRFSGSRSATSASLAISGLQSEDEADYYCATWDDSVNGWVFGGGTKLTV
LGSRGGGGSGGGGSGGGGSLEMAEVQLVESGAEVKKPGDSVKVSCKPSGYNFL
NYGINWVRQAPGQGLEWMGWISTYTGNTNYAQKLQGRVTFTTDTSTSTAYME
MRSLRSDDTAVYYCARQQGGGWYDVWGQGTLVTVSS [SEQ ID NO: 704]

TABLE 133
ET200-107

DNA Sequence
cagtctgtcgtgacgcagccgccctcagtgtctgcggccccaggagagaaggtcaccatctcctgctctggaagcaacttcaat
gttggaaataatgatgtatcctggtatcagcaactcccaggtgcagcccccaaactcctcatttatgacaataataagcgaccctca
gggattcctgaccgattctctggctccaagtctggcacgtcagccaccctggacatcaccgggctccacagtgacgacgaggc
cgattattactgcggaacatgggatagcagcctgaatactgggggggtcttcggaactgggaccaaggtcaccgtcctaggttct
agaggtggtggtggtagcggcggcggcggctctggtggtggtggatccctcgagatggccgaggtccagctggtgcagtctg
gagctgaggtgaagaagcctggggcctcagtgaaggtctcctgcaaggcttctggttacacctttaccagctatactatcagctg
ggtacgacaggcccctggacaagggcttgagtggatgggatggatcagcacttacaatggtctcacaaactatgcacagaacct
ccagggcagagtcaccatgactacagacacattcacgaccacagcctacatggagctgaggagcctcagatctgacgacacg
gccgtgtattactgtgtgagagaggggtcccccgactacggtgacttcgcgtcctttgactactggggccagggaaccctggtca
ccgtctcctca [SEQ ID NO: 705]
Amino Acid Sequence
QSVVTQPPSVSAAPGEKVTISCSGSNFNVGNNDVSWYQQLPGAAPKLLIYDNNK
RPSGIPDRFSGSKSGTSATLDITGLHSDDEADYYCGTWDSSLNTGGVFGTGTKVT
VLGSRGGGGSGGGGSGGGGSLEMAEVQLVQSGAEVKKPGASVKVSCKASGYTF
TSYTISWVRQAPGQGLEWMGWISTYNGLTNYAQNLQGRVTMTTDTFTTTAYME
LRSLRSDDTAVYYCVREGSPDYGDFASFDYWGQGTLVTVSS [SEQ ID NO: 706]

TABLE 134
ET200-108

DNA Sequence
cagtctgtgttgacgcagccgccctcagtgtctgcgcccccgggacagaaggtcaccatctcctgctctggaagcagctccaac
attgggaataattatgtatcctggtaccagcagttcccaggaacagcccccaaactcctcatttatgacaataataagcgaccctca
gggatttctgaccgattctctggctccaagtctggcacgtcagccaccctgggcatcgccggactccagactggggacgaggc
cgattattactgcggaacatgggataccagcctgagtggtttttatgtcttcggaagtgggaccaaggtcaccgtcctaggttctag
aggtggtggtggtagcggcggcggcggctctggtggtggtggatccctcgagatggccgaggtccagctggtacagtctgga
gctgaggtgaagaagcctggggcctcagtgaaggtctcctgcaaggcttctggttacacctttaccagctatactatcagctgggt
acgacaggcccctggacaagggcttgagtggatgggatggatcagcacttacaatggtctcacaaactatgcacagaacctcc
agggcagagtcaccatgactacagacacattcacgaccacagcctacatggagctgaggagcctcagatctgacgacacggc
cgtgtattactgtgtgagagaggggtcccccgactacggtgacttcgcgtcctttgactactggggccagggaaccctggtcacc
gtctcctca [SEQ ID NO: 707]
Amino Acid Sequence
QSVLTQPPSVSAPPGQKVTISCSGSSSNIGNNYVSWYQQFPGTAPKLLIYDNNKRP
SGISDRFSGSKSGTSATLGIAGLQTGDEADYYCGTWDTSLSGFYVFGSGTKVTVL
GSRGGGGSGGGGSGGGGSLEMAEVQLVQSGAEVKKPGASVKVSCKASGYTFTS
YTISWVRQAPGQGLEWMGWISTYNGLTNYAQNLQGRVTMTTDTFTTTAYMEL
RSLRSDDTAVYYCVREGSPDYGDFASFDYWGQGTLVTVSS [SEQ ID NO: 708]

TABLE 135
ET200-109

DNA Sequence
ctgcctgtgctgactcagccaccctcagcgtctgcgacccccgggcagagggtcaccatctcttgttctggaaccacctccaaca
tcggaagtaatactgtacactggtaccagcagctcccagggacggcccccaaactcctcatctataataataatcagcggccctc
aggggtccctgaccgattctctggctccaagtctggcacctcagcctccctggccatcagtgggctccggtccgaggatgaggc
tacatattcctgtgcaacatgggatgacagcctgagtggtgtggtcttcggcggagggaccaagctgaccgtcctaggttctaga
ggtggtggtggtagcggcggcggcggctctggtggtggtggatccctcgagatggccgaggtccagctggtgcagtctgggg
ctgaggtgaagaagcctgggtcctcggtgaaggtctcctgcaaggcttctggaggcaccttcagcagctatgctatcagctgggt
gcgacaggcccctggacaagggcttgagtggatgggagggatcatccctatctttggtacagcaaactacgcacagaagttcc
agggcagagtcacgattaccgcggacgaatccacgagcacagcctacatggagctgagcagcctgagatctgaggacacgg
ccgtgtattactgtgcgagagatcccgcctacggtgactacgagtatgatgcttttgatatctggggccaagggacaatggtcacc
gtctcttca [SEQ ID NO: 709]
Amino Acid Sequence
LPVLTQPPSASATPGQRVTISCSGTTSNIGSNTVHWYQQLPGTAPKLLIYNNNQRP
SGVPDRFSGSKSGTSASLAISGLRSEDEATYSCATWDDSLSGVVFGGGTKLTVLG
SRGGGGSGGGGSGGGGSLEMAEVQLVQSGAEVKKPGSSVKVSCKASGGTFSSY
AISWVRQAPGQGLEWMGGIIPIFGTANYAQKFQGRVTITADESTSTAYMELSSLR
SEDTAVYYCARDPAYGDYEYDAFDIWGQGTMVTVSS [SEQ ID NO: 710]

TABLE 136
ET200-110

DNA Sequence
cagtctgtgttgacgcagccgccctcagcgtctgggacccccgggcagagggtcaccatctcttgttctggaagcagctccaac
atcggaactaatggtgtaaactggttccagcagttcccaggaacggcccccaaactcctcatctatactaatgatcagcggccctc
aggggtccctgaccgattctctggctccaagtctggcacctcagcctccctggccatcagtgggctccagtctgcggatgaggct
gattattactgtgcagtgtgggaccacagcctgaatggtccggtgttcggcggagggaccaagctgaccgtcctaggttctaga
ggtggtggtggtagcggcggcggcggctctggtggtggtggatccctcgagatggcccaggtgcagctggtgcagtctgggg
ctgaggtgaagaagcctgggtcctcggtgaaggtctcctgcaaggcttctggaggcaccttcagcagctatgctatcagctgggt
gcgacaggcccctggacaagggcttgagtggatgggagggatcatccctatctttggtacagcaaactacgcacagaagttcc
agggcagagtcacgattaccgcggacgaatccacgagcacagcctacatggagctgagcagcctgagatctgaggacacgg
ccgtgtattactgtgcgagaggggccggttttgatgcttttgatatctggggccaagggacaatggtcaccgtctcttca [SEQ
ID NO: 711]
Amino Acid Sequence
QSVLTQPPSASGTPGQRVTISCSGSSSNIGTNGVNWFQQFPGTAPKLLIYTNDQRP
SGVPDRFSGSKSGTSASLAISGLQSADEADYYCAVWDHSLNGPVFGGGTKLTVL
GSRGGGGSGGGGSGGGGSLEMAQVQLVQSGAEVKKPGSSVKVSCKASGGTFSS
YAISWVRQAPGQGLEWMGGIIPIFGTANYAQKFQGRVTITADESTSTAYMELSSL
RSEDTAVYYCARGAGFDAFDIWGQGTMVTVSS [SEQ ID NO: 712]

TABLE 137
ET200-111

DNA Sequence
caggctgtgctgactcagccaccctcagcgtctgggacccccgggcagagggtcaccatctcttgttctggaagcagctccaac
atcggaagtaatactgtaaactggtaccagcagctcccaggaacggcccccaaactcctcatctatagtaataatcagcggccct
caggggtccctgaccgattctctggctccaagtctggcacctcagcctccctggccatcagtgggctccagtctgaggatgaga
ctgattattactgtgcagcatgggatgacagcctgaatggttatgtcttcggaactgggaccaaggtcaccgtcctaggttctaga
ggtggtggtggtagcggcggcggcggctctggtggtggtggatccctcgagatggcccaggtgcagctacagcagtggggc
gcaggactgttgaagccttcggagaccctgtccctcacctgcgctgtctatggtgggtccttcagtggttactactggagctggat
ccgccagcccccagggaaggggctggagtggattggggaaatcaatcatagtggaagcaccaactacaacccgtccctcaag
agtcgagtcaccatatcagtagacacgtccaagaaccagttctccctgaagctgagctctgtgaccgccgcggacacggctgtg
tattactgtgcgagagaggggctagatgcttttgatatctggggccaagggacaatggtcaccgtctcttca [SEQ ID NO:
713]
Amino Acid Sequence
QAVLTQPPSASGTPGQRVTISCSGSSSNIGSNTVNWYQQLPGTAPKLLIYSNNQRP
SGVPDRFSGSKSGTSASLAISGLQSEDETDYYCAAWDDSLNGYVFGTGTKVTVL
GSRGGGGSGGGGSGGGGSLEMAQVQLQQWGAGLLKPSETLSLTCAVYGGSFSG
YYWSWIRQPPGKGLEWIGEINHSGSTNYNPSLKSRVTISVDTSKNQFSLKLSSVT
AADTAVYYCAREGLDAFDIWGQGTMVTVSS [SEQ ID NO: 714]

TABLE 138
ET200-112

DNA Sequence
caggctgtgctgactcagccaccctcagcgtctgggacccccgggcagagggtcaccatctcttgttctggaagcagctccaac
atcggaagtaatactgtaaactggtaccagcagctcccaggaacggcccccaaactcctcatgtatagtaatgatcagcggccct
caggggtccctgaccgattctctggctccaagtctggcacctcagcctccctggccatcagtgggctccagtctgaggatgagg
ctgattattattgtgcagcatgggatgacagcctgaatggttatgtcttcgcagctgggacccagctcaccgttttaagttctagagg
tggtggtggtagcggcggcggcggctctggtggtggtggatccctcgagatggcccaggtgcagctacagcagtggggcgc
aggactgttgaagccttcggagaccctgtccctcacctgcgctgtctatggtgggtccttcagtggttactactggagctggatcc
gccagcccccagggaaggggctggagtggattggggaaatcaatcatagtggaagcaccaactacaacccgtccctcaagag
tcgagtcaccatatcagtagacacgtccaagaaccagttctccctgaagctgagctctgtgaccgccgcggacacggctgtgtat
tactgtgcgagagaggggctagatgcttttgatatctggggccaagggacaatggtcaccgtctcttca [SEQ ID NO:
715]
Amino Acid Sequence
QAVLTQPPSASGTPGQRVTISCSGSSSNIGSNTVNWYQQLPGTAPKLLMYSNDQR
PSGVPDRFSGSKSGTSASLAISGLQSEDEADYYCAAWDDSLNGYVFAAGTQLTV
LSSRGGGGSGGGGSGGGGSLEMAQVQLQQWGAGLLKPSETLSLTCAVYGGSFS
GYYWSWIRQPPGKGLEWIGEINHSGSTNYNPSLKSRVTISVDTSKNQFSLKLSSV
TAADTAVYYCAREGLDAFDIWGQGTMVTVSS [SEQ ID NO: 716]

TABLE 139
ET200-113

DNA Sequence
cagtctgtcgtgacgcagccgccctcagtgtctgcggccccaggacagaaggtcaccatctcctgctctggaagcagctccaa
cattgggaataattatgtatcctggtaccagcagctcccaggaacagcccccaaactcctcatttatgacaataataagcgaccct
cagggattcctgaccgattctctggctccaagtctggcacgtcagccaccctgggcatcactggactccagactggggacgag
gccgattattactgcggaacatgggatagcagcctgagtgctgcttatgtcttcggaactgggaccaaggtcaccgtcctaggttc
tagaggtggtggtggtagcggcggcggcggctctggtggtggtggatccctcgagatggcccaggtccagctggtacagtctg
gagctgaggtgaagaagcctggggcctcagtgaaggtctcctgcaaggcttctggttacagctttaccagctatactatcagctg
ggttcgacaggcccctggacaaggccttgagtggatgggatgggtcagcacttacaatggtctcagaaactatgcacagaacct
ccagggcagagtcaccatgactacagacacactcacgaccacagcctacatggagctgaggagcctcagatctgacgacacg
gccgtgtattattgtgtgagagaggggtcccccgactacggtgacttcgcggcctttgactactggggccagggcaccctggtc
accgtctcctca [SEQ ID NO: 717]
Amino Acid Sequence
QSVVTQPPSVSAAPGQKVTISCSGSSSNIGNNYVSWYQQLPGTAPKLLIYDNNKR
PSGIPDRFSGSKSGTSATLGITGLQTGDEADYYCGTWDSSLSAAYVFGTGTKVTV
LGSRGGGGSGGGGSGGGGSLEMAQVQLVQSGAEVKKPGASVKVSCKASGYSFT
SYTISWVRQAPGQGLEWMGWVSTYNGLRNYAQNLQGRVTMTTDTLTTTAYME
LRSLRSDDTAVYYCVREGSPDYGDFAAFDYWGQGTLVTVSS [SEQ ID NO: 718]

TABLE 140
ET200-114

DNA Sequence
caggctgtgctgactcagccaccctcagcgtctgagacccccgggcagagggtcaccatctcttgttctggaagcaggtccaac
atcggaactaatattgtacactggtaccagcagcgcccaggaatggcccccaaactcctcacttatggtagtcggcggccctca
ggggtcccggaccgattctctggctccaagtttggcacctcagcctccctggccatcagtgggctccagtctgaggatgaggct
gattattattgtgcagcatgggatgacagtctgaatggtccggctttcggcggagggaccaagctgaccgtcctaggttctagag
gtggtggtggtagcggcggcggcggctctggtggtggtggatccctcgagatggcccaggtgcagctacagcagtggggcg
caggactgttgaagccttcggagaccctgtccctcacctgcgctgtctatggtgggtccttcagtggttactactggagctggatc
cgccagcccccagggaaggggctggagtggattggggaaatcaatcatagtggaagcaccaactacaacccgtccctcaaga
gtcgagtcaccatatcagtagacacgtccaagaaccagttctccctgaagctgagctctgtgaccgccgcggacacggctgtgt
attactgtgcgagagacggtgggggctactttgactactggggccagggaaccctggtcaccgtctcctca [SEQ ID NO:
719]
Amino Acid Sequence
QAVLTQPPSASETPGQRVTISCSGSRSNIGTNIVHWYQQRPGMAPKLLTYGSRRP
SGVPDRFSGSKFGTSASLAISGLQSEDEADYYCAAWDDSLNGPAFGGGTKLTVL
GSRGGGGSGGGGSGGGGSLEMAQVQLQQWGAGLLKPSETLSLTCAVYGGSFSG
YYWSWIRQPPGKGLEWIGEINHSGSTNYNPSLKSRVTISVDTSKNQFSLKLSSVT
AADTAVYYCARDGGGYFDYWGQGTLVTVSS [SEQ ID NO: 720]

TABLE 141
ET200-115

DNA Sequence
cagtctgtgttgacgcagccgccctcagtgtctggggccccagggcagagggtcaccatctcctgcactgggagcagctccaatatcggggca
cgttatgatgtacactggtaccagcaactcccaggaacagccccccgactcctcatctctgctaactacgatcggccctcaggggtccctgaccg
attctctggctccaagtctggcacctcagcctccctggccatcactgggctccaggctgaggatgaggctgattattactgccagtcctatgacag
cagtgtgagtgcttgggtgttcggcggagggaccaaggtcaccgtcctaggttctagaggtggtggtggtagcggcggcggcggctctggtggt
ggtggatccctcgagatggccgaagtgcagctggtgcagtctggggctgaagtgaaggagcctggggcctcagtgaggatctcctgccaggc
atctggatacaacttcatcagttattatatgcactgggtgcggcaggcccctgggcaaggtcttgagtggatgggcaccatcaacccaggcagtg
gtgagacagactactcacagaagttgcagggcagagtcaccatgaccagggacccgtccacgggtacattcgacatggggctgagcagcctg
acatctggggacacggccgtctattattgtgcgacaggtctcatcagaggagctagcgatgcttttaatatctggggccgggggacaatggtcacc
gtctcttca [SEQ ID NO: 721]
Amino Acid Sequence
QSVLTQPPSVSGAPGQRVTISCTGSSSNIGARYDVHWYQQLPGTAPRLLISANYDRPSGVPD
RFSGSKSGTSASLAITGLQAEDEADYYCQSYDSSVSAWVFGGGTKVTVLGSRGGGGSGGG
GSGGGGSLEMAEVQLVQSGAEVKEPGASVRISCQASGYNFISYYMHWVRQAPGQGLEWM
GTINPGSGETDYSQKLQGRVTMTRDPSTGTFDMGLSSLTSGDTAVYYCATGLIRGASDAFNI
WGRGTMVTVSS [SEQ ID NO: 722]

TABLE 142
ET200-116

DNA Sequence
cagcctgtgctgactcagccaccctcagtgtccgtgtccccaggacagacggccgccatcccctgttctggagataagttgggggataaatttgct
tcctggtatcagcagaagccaggccagtcccctgtgctggtcatctatcaagatactaagcggccctcagggatccctgagcgattctctggctcc
aactctgggaacacagccactctgaccatcagcgggacccaggctatggatgaggctgactattactgtcagacgtgggccagcggcattgtgg
tgttcggcggagggaccaagctgaccgtcctaggttctagaggtggtggtggtagcggcggcggcggctctggtggtggtggatccctcgaga
tggcccaggtacagctgcagcagtcaggtccaggactggtgaagccctcgcagaccctctcactcacctgtgccatctccggggacagtgtctct
agcaacagtgctgcttggaactggatcaggcagtccccatcgagaggccttgagtggctgggaaggacatactacaggtccaagtggtataatg
attatgcagtatctgtgaaaagtcgaataaccatcaacccagacacatccaagaaccagttctccctgcagctgaactctgtgactcccgaggaca
cggctgtgtattactgtgcaagagagcgcagtggctggaagggatttgactactggggccagggaaccctggtcaccgtctcctca [SEQ ID
NO: 723]
Amino Acid Sequence
QPVLTQPPSVSVSPGQTAAIPCSGDKLGDKFASWYQQKPGQSPVLVIYQDTKRPSGIPERFSG
SNSGNTATLTISGTQAMDEADYYCQTWASGIVVFGGGTKLTVLGSRGGGGSGGGGSGGGG
SLEMAQVQLQQSGPGLVKPSQTLSLTCAISGDSVSSNSAAWNWIRQSPSRGLEWLGRTYYR
SKWYNDYAVSVKSRITINPDTSKNQFSLQLNSVTPEDTAVYYCARERSGWKGFDYWGQGT
LVTVSS [SEQ ID NO: 724]

TABLE 143
ET200-117

DNA Sequence
gatgttgtgatgactcagtctccaccctccctgtccgtcacccctggagagccggcctccatcacctgcaggtctagtcagagcctcctggaaaga
aatgcatacaactacttggattggtacctgcagaggccaggacagtctccacagctcctgatctacttgggttctaatcgggccgccggggtccct
gacaggttcagtggcagtggatcaggcagagattttacactgaaaatcagcagagtggagcctgaggatgttggggtttattactgcatgcaagct
ctacaagctccgttcactttcggcggagggaccaaggtggagatcaaacgttctagaggtggtggtggtagcggcggcggcggctctggtggt
ggtggatccctcgagatggccgaagtgcagctggtgcagtctgggggaggcttggtacagcctggggggtccctgagactctcctgtgcagcct
ctggattcacctttagcagctatgccatgagctgggtccgccaggctccagggaaggggctggagtgggtctcagctattagtggtagtggtggt
agcacatactacgcagactccgtgaagggccggttcaccatctccagagacaattccaagaacacgctgtatctgcaaatgaacagcctgagag
ccgaggacacggccgtatattactgtgcgaaatggggcccgtttcaggatgcttttgatatctggggccaagggacaatggtcaccgtctcttca
[SEQ ID NO: 725]
Amino Acid Sequence
DVVMTQSPPSLSVTPGEPASITCRSSQSLLERNAYNYLDWYLQRPGQSPQLLIYLGSNRAAG
VPDRFSGSGSGRDFTLKISRVEPEDVGVYYCMQALQAPFTFGGGTKVEIKRSRGGGGSGGG
GSGGGGSLEMAEVQLVQSGGGLVQPGGSLRLSCAASGFTFSSYAMSWVRQAPGKGLEWV
SAISGSGGSTYYADSVKGRFTISRDNSKNTLYLQMNSLRAEDTAVYYCAKWGPFQDAFDIW
GQGTMVTVSS [SEQ ID NO: 726]

TABLE 144
ET200-118

DNA Sequence
caggctgtgctgactcagcctgcctccgtgtctgggtctcctggacagtcgatcaccatctcctgcactggaaccagcagtgacgttggtggttat
aactatgtctcctggtaccaacagcacccgggcaaagcccccaaactcatgatttatgaggtcagtaatcggccctcaggggtttctaatcgcttc
tctggctccaagtctggcaacacggcctccctgaccatctctgggctccaggctgaggacgaggctgattattactgcagctcatatacaagcagc
agcaccccttatgtcttcggagcagggaccaaggtcaccgtcctaggttctagaggtggtggtggtagcggcggcggcggctctggtggtggtgga
tccctcgagatggccgaggtgcagctggtggagtctgggggaggcttggtacagcctggcaggtccctgagactctcctgtgcagcctctggatt
cacctttgatgattatgccatgcactgggtccggcaagctccagggaagggcctggagtgggtctcaggtattagttggaatagtggtagcatagg
ctatgcggactctgtgaagggccgattcaccatctccagagacaacgccaagaactccctgtatctgcaaatgaacagtctgagagctgaggaca
cggccttgtattactgtgcaaaagccaggtggacagcagtggcatcagaccaccactttgactactggggccagggaacgctggtcaccgtctc
ctca [SEQ ID NO: 727]
Amino Acid Sequence
QAVLTQPASVSGSPGQSITISCTGTSSDVGGYNYVSWYQQHPGKAPKLMIYEVSNRPSGVSN
RFSGSKSGNTASLTISGLQAEDEADYYCSSYTSSSTPYVFGAGTKVTVLGSRGGGGSGGGGS
GGGGSLEMAEVQLVESGGGLVQPGRSLRLSCAASGFTFDDYAMHWVRQAPGKGLEWVSG
ISWNSGSIGYADSVKGRFTISRDNAKNSLYLQMNSLRAEDTALYYCAKARWTAVASDHHF
DYWGQGTLVTVSS [SEQ ID NO: 728]

TABLE 145
ET200-119

DNA Sequence
caggctgtgcttactcagccaccctcagcgtctgggacccccgggcagagggtcaccatctcttgttctggaagcagctccaacatcggaagtaa
tactgtaaactggtaccagcagctcccaggaacggcccccaaactcctcatctatagtaataatcagcggccctcaggggtccctgaccgattctc
tggctccaagtctggcacctcagcctccctggccatcagtgggctccagtctgaggatgaggctgattattactgtgcagcatgggatgacagcct
gaatggttatgtcttcggaactgggaccaagctgaccgtcctaggttctagaggtggtggtggtagcggcggcggcggctctggtggtggtggat
ccctcgagatggccgaggtgcagctggtgcagtctggggctgaggtgaagaagcctgggtcctcggtgaaggtctcctgcaaggcttctggag
gcaccttcagcagctatgctatcagctgggtgcgacaggcccctggacaagggcttgagtggatgggagggatcatccctatctttggtacagca
aactacgcacagaagttccagggcagagtcacgattaccgcggacgaatccacgagcacagcctacatggagctgagcagcctgagatctga
ggacacggccgtgtattactgtgcgagagattgggactacatggacgtctggggcaaagggaccacggtcaccgtctcctca [SEQ ID
NO: 729]
Amino Acid Sequence
QAVLTQPPSASGTPGQRVTISCSGSSSNIGSNTVNWYQQLPGTAPKLLIYSNNQRPSGVPDRF
SGSKSGTSASLAISGLQSEDEADYYCAAWDDSLNGYVFGTGTKLTVLGSRGGGGSGGGGS
GGGGSLEMAEVQLVQSGAEVKKPGSSVKVSCKASGGTFSSYAISWVRQAPGQGLEWMGGI
IPIFGTANYAQKFQGRVTITADESTSTAYMELSSLRSEDTAVYYCARDWDYMDVWGKGTT
VTVSS [SEQ ID NO: 730]

TABLE 146
ET200-120

DNA Sequence
tcctatgagctgactcagccaccctcagcgtctgggacccccgggcagagggtcaccatctcttgttctggaagcagctccaacatcggaagtaa
tactgtaaactggtaccagcagctcccaggaacggcccccaaactcctcatctatagtaataatcagcggccctcaggggtccctgaccgattctc
tggctccaagtctggcacctcagcctccctggccatcagtgggctccagtctgaggatgaggctgattattactgtgcagcatgggatgacagcct
gaatggttatgtcttcggaactgggaccaaggtcaccgtcctaggttctagaggtggtggtggtagcggcggcggcggctctggtggtggtggat
ccctcgagatggccgaggtgcagctggtggagtctggagctgaggtgaagaagcctggggcctcagtgaaggtctcctgcaaggcttctggtta
cacctttaccagctatggtatcagctgggtgcgacaggcccctggacaagggcttgagtggatgggatggatcagcgcttacaatggtaacacaa
actatgcacagaagctccagggcagagtcaccatgaccacagacacatccacgagcacagcctacatggagctgaggagcctgagatctgac
gacacggccgtgtattactgtgcgagagacctatctcggggagctaacccgcattactactactactacggtatggacgtctggggccaagggac
cacggtcaccgtctcctca [SEQ ID NO: 731]
Amino Acid Sequence
SYELTQPPSASGTPGQRVTISCSGSSSNIGSNTVNWYQQLPGTAPKLLIYSNNQRPSGVPDRF
SGSKSGTSASLAISGLQSEDEADYYCAAWDDSLNGYVFGTGTKVTVLGSRGGGGSGGGGS
GGGGSLEMAEVQLVESGAEVKKPGASVKVSCKASGYTFTSYGISWVRQAPGQGLEWMGW
ISAYNGNTNYAQKLQGRVTMTTDTSTSTAYMELRSLRSDDTAVYYCARDLSRGANPHYYY
YYGMDVWGQGTTVTVSS [SEQ ID NO: 732]

TABLE 147
ET200-121

DNA Sequence
cagtctgtgttgacgcagccgccctcagtgtctggggccccagggcagagggtcaccgtctcctgcactgggagcagatccaacatcggggca
ggatatgatgtacactggtaccagcaacttccaggaacagcccccaaactcctcatctatggaaatagtaatcggcctccaggggtccctgaccga
ttctctgggtctaagtctggcacctcagcctccctggtcatcactgggctccaggctgaggatgccgctgattattactgccagtcctatgacaac
actgtgcgtgaatcaccttatgtcttcggaactgggaccaaggtcaccgtcctaggttctagaggtggtggtggtagcggcggcggcggctctggt
ggtggtggatccctcgagatggccgaggtccagctggtacagtctggggctgaggtgaagaagcctggggcctcagtgaaggtctcctgcaag
gtttccggatacaccctcactgaattatccatgcactgggtgcgacaggctcctggaaaagggcttgagtggatgggaggttttgatcctgaagat
ggtgaaacaatctacgcacagaagttccagggcagagtcaccatgaccgaggacacatctacagacacagcctacatggagctgagcagcctg
agatctgaggacacggccgtgtattactgtgcaacagagagtaatttagtgtcccggcactactactactacggtatggacgtctggggccaagg
gaccacggtcaccgtctcctca [SEQ ID NO: 733]
Amino Acid Sequence
QSVLTQPPSVSGAPGQRVTVSCTGSRSNIGAGYDVHWYQQLPGTAPKLLIYGNSNRPPGVP
DRFSGSKSGTSASLVITGLQAEDAADYYCQSYDNTVRESPYVFGTGTKVTVLGSRGGGGSG
GGGSGGGGSLEMAEVQLVQSGAEVKKPGASVKVSCKVSGYTLTELSMHWVRQAPGKGLE
WMGGFDPEDGETIYAQKFQGRVTMTEDTSTDTAYMELSSLRSEDTAVYYCATESNLVSRH
YYYYGMDVWGQGTTVTVSS [SEQ ID NO: 734]

TABLE 148
ET200-122

DNA Sequence
ctgcctgtgctgactcagccaccctcagcgtctgggacccccgggcagagggtcaccatctcttgttctggaaccagctccaacatcggaagtaa
ttctgtagactggtaccagcagctcccaggaacggcccccaaactcctcatctatagtaataatcagcggccctcaggggtccctgaccgaatctc
tggctccaagtctggcacctcagcctccctggccatcagtgggctccagtctgaggatgaggctgattattactgtgcagcatgggatgacagcct
gaatggttatgtcttcggaactgggaccaaggtcaccgtcctaggttctagaggtggtggtggtagcggcggcggcggctctggtggtggtggat
ccctcgagatggccgaagtgcagctggtgcagtctggggctgaggtgaagaagcctggggcctcagtgaaggtctcctgcaaggcttctggat
acaccttcaccggctactatatgcactgggtgcgacaggcccctggacaagggcttgagtggatgggatggatcaaccctaacagtggtggcac
aaactatgcacagaagtttcagggcagggtcaccatgaccagggacacgtccatcagcacagcctacatggagctgagcaggctgagatctga
cgacacggccgtgtattactgtgcgagagattacggatactatggttcggggagttattcgagcggccccctttactactactacggtatggacgt
ctggggccaagggaccacggtcaccgtctcctca [SEQ ID NO: 735]
Amino Acid Sequence
LPVLTQPPSASGTPGQRVTISCSGTSSNIGSNSVDWYQQLPGTAPKLLIYSNNQRPSGVPDRIS
GSKSGTSASLAISGLQSEDEADYYCAAWDDSLNGYVFGTGTKVTVLGSRGGGGSGGGGSG
GGGSLEMAEVQLVQSGAEVKKPGASVKVSCKASGYTFTGYYMHWVRQAPGQGLEWMG
WINPNSGGTNYAQKFQGRVTMTRDTSISTAYMELSRLRSDDTAVYYCARDYGYYGSGSYS
SGPLYYYYGMDVWGQGTTVTVSS [SEQ ID NO: 736]

TABLE 149
ET200-123

DNA Sequence
caggctgtgctgactcagccaccctcagcgtctgggacccccgggcagagggtcaccatctcttgttctggaagcagctccaacatcggaagta
atactgtaaactggtaccagcagctcccaggaacggcccccaaactcctcatgtataataatgatcagcggccctcaggggtccctgaccgattct
ctggctccaagtctggcacctcagcctccctggccatcagtgggctccagtctgaggatgaggctgattattactgtgcagcatgggatgacagc
ctcaatggttatgtcttcggacctgggaccaaggtcaccgtcctaggttctagaggtggtggtggtagcggcggcggcggctctggtggtggtgg
atccctcgagatggcccaggtgcagctggtggagtctggagctgaggtgaagaagcctggggcctcagtgaaggtctcctgcaaggcttctggt
tacacctttaccagctatggtatcagctgggtgcgacaggcccctggacaagggcttgagtggatgggatggatcagcgcttacaatggtaacac
aaactatgcacagaagctccagggcagagtcaccatgaccacagacacatccacgagcacagcctacatggagctgaggagcctgagatctg
acgacacggccgtgtattactgtgcgagagacctatctcggggagctaacccgcattactactactactacggtatggacgtctggggccaaggg
accacggtcaccgtctcctca [SEQ ID NO: 737]
Amino Acid Sequence
QAVLTQPPSASGTPGQRVTISCSGSSSNIGSNTVNWYQQLPGTAPKLLMYNNDQRPSGVPD
RFSGSKSGTSASLAISGLQSEDEADYYCAAWDDSLNGYVFGPGTKVTVLGSRGGGGSGGG
GSGGGGSLEMAQVQLVESGAEVKKPGASVKVSCKASGYTFTSYGISWVRQAPGQGLEWM
GWISAYNGNTNYAQKLQGRVTMTTDTSTSTAYMELRSLRSDDTAVYYCARDLSRGANPH
YYYYYGMDVWGQGTTVTVSS [SEQ ID NO: 738]

TABLE 150
ET200-125

DNA Sequence
aattttatgctgactcagccccacgctgtgtcggagtctccggggaagacggtaaccatctcctgcacccgcagcagtggcagtattgccagcaa
ctatgtgcagtggtaccagcagcgcccgggcagttccccccgcactgtgatttatgaggataatcaaagaccctctggggtccctggtcggttctc
tggctccatcgacagctcctccaactctgcctccctcaccatctctggactgaagactgaggacgaggctgactactactgtcagtcttatgattc
caccagtgtgcttttcggcggagggaccaagctgaccgtcctaggttctagaggtggtggtggtagcggcggcggcggctctggtggtggtggatc
cctcgagatggccgaggtccagctggtgcagtctggggctgaggtgaagaagccagggtcctcggtgaaggtctcctgcaaggcctcgggag
gcaccttcagcagcaattctctcagctgggtgcgacaggcccctggacaagggcttgagtggatgggaaggatcttccctatcctgggtataaca
aactatgcacagaagttccagggcagagtcacgattaccgcggacaaatccacgagcacagcctacatggagctgagcagcctgagatctgag
gacacggccgtctattactgtgcgagaggaaactaccaatggtatgatgcttttgatatctggggccaagggacaatggtcaccgtctcttca
[SEQ ID NO: 739]
Amino Acid Sequence
NFMLTQPHAVSESPGKTVTISCTRSSGSIASNYVQWYQQRPGSSPRTVIYEDNQRPSGVPGR
FSGSIDSSSNSASLTISGLKTEDEADYYCQSYDSTSVLFGGGTKLTVLGSRGGGGSGGGGSG
GGGSLEMAEVQLVQSGAEVKKPGSSVKVSCKASGGTFSSNSLSWVRQAPGQGLEWMGRIF
PILGITNYAQKFQGRVTITADKSTSTAYMELSSLRSEDTAVYYCARGNYQWYDAFDIWGQG
TMVTVSS [SEQ ID NO: 740]

TABLE 151
ET200-005

DNA Sequence
cagcctgtgctgactcagccaccctcagtgtcagtggtcccaggaaagacggccaggattacctgtgggggaaaaaacattggaagtaaaagtg
tgcactggtaccagcagaagccaggccaggcccctgtggtggtcatccattatgatagtgaccggccctcagggatccctgagcgattctctggc
tccaactctgggaacacggccaccctgaccatcagcagggtcgaagccggggatgaggccgactattactgtcaggtgtgggatagtagtagtg
atcatccttatgtcttcggaactgggaccaaggtcaccgtcctaggttctagaggtggtggtggtagcggcggcggcggctctggtggtggtgga
tccctcgagatggcccaggtgcagctggtgcagtctggagctgaggtgaagaagcctggggcctcagtgaaggtctcctgcaaggcttctggtt
acacctttaccaactatggtatcagctgggtgcgacaggcccctggacaagggcttgagtggatgggatggatcagcgcttacaatggtaacaca
aactatgcacataagctccagggcagagtcaccatgaccacagacacatccacgagcacagccaacatggagctgaggagcctgagacctga
cgacactgccgtgtattactgtgcgcgctcttacttcggttctcatgattactggggtcaaggtactctggtgaccgtctcctca [SEQ ID
NO: 741]
Amino Acid Sequence
QPVLTQPPSVSVVPGKTARITCGGKNIGSKSVHWYQQKPGQAPVVVIHYDSDRPSGIPERFS
GSNSGNTATLTISRVEAGDEADYYCQVWDSSSDHPYVFGTGTKVTVLGSRGGGGSGGGGS
GGGGSLEMAQVQLVQSGAEVKKPGASVKVSCKASGYTFTNYGISWVRQAPGQGLEWMG
WISAYNGNTNYAHKLQGRVTMTTDTSTSTANMELRSLRPDDTAVYYCARSYFGSHDYWG
QGTLVTVSS [SEQ ID NO: 742]

TABLE 152
ET200-124

DNA Sequence
tcctatgtgctgactcagccaccctcggtgtcagtggccccaggaaagacggccaggatttcctgtgggggaaacgacattggaagtaaaagtgt
tttctggtatcagcagaggccaggccaggcccctgtgttggtcgtctatgatgatagcgaccggccctcagggctccctgagcgattctctggctt
caactctgggaacacggccaccctgaccatcagcagggtcgaagccggggatgaggccgactattactgtcaagtgtgggatagtagtagtgat
cattatgtcttcggaactgggaccaaggtcaccgtcctaggttctagaggtggtggtggtagcggcggcggcggctctggtggtggtggatccct
cgagatggcccaggtgcagctggtggagtctgggggaggcttggtacagcctggcaggtccctgagactctcctgtgcagcctctggattcacc
tttgatgattatgccatgcactgggtccggcaagctccagggaagggcctggagtgggtctcaggtattagttggaatagtggtagcataggctat
gcggactctgtgaagggccgattcaccatctccagagacaacgccaagaactccctgtatctgcaaatgaacagtctgagagctgaggacacgg
ccttgtattactgtgcaaaagatataacctatggttcggggagttatggtgcttttgatatctggggccaagggacaatggtcaccgtctcttca
[SEQ ID NO: 743]
Amino Acid Sequence
SYVLTQPPSVSVAPGKTARISCGGNDIGSKSVFWYQQRPGQAPVLVVYDDSDRPSGLPERFS
GFNSGNTATLTISRVEAGDEADYYCQVWDSSSDHYVFGTGTKVTVLGSRGGGGSGGGGSG
GGGSLEMAQVQLVESGGGLVQPGRSLRLSCAASGFTFDDYAMHWVRQAPGKGLEWVSGI
SWNSGSIGYADSVKGRFTISRDNAKNSLYLQMNSLRAEDTALYYCAKDITYGSGSYGAFDI
WGQGTMVTVSS [SEQ ID NO: 744]

TABLE 153
ET200-001

DNA Sequence
cagtctgtgttgacgcagccaccctcagcgtctgggacccccgggcagagggtcaccatctcttgttctggaagcagctccaacatcggaagtaa
tactgtaaactggtaccagcagctcccaggaacggcccccaaactcctcatctatagtaataatcagcggccctcaggggtccctgaccgattctc
tggctccaagtctggcacctcagcctccctggccatcagtgggctccagtctgaggatgaggctgattattactgtgcagcatgggatgacagcct
gaatggttatgtcttcggaactgggaccaaggtcaccgtcctaggttctagaggtggtggtggtagcggcggcggcggctctggtggtggtggat
ccctcgagatggcccaggtgcagctacagcagtggggcgcaggactgttgaagccttcggagaccctgtccctcacctgcgctgtgtatggtgg
gtccttcagtggttactactggagctggatccgccagcccccagggaaggggctggagtggattggggaaatcaatcatagtggaagcaccaac
tacaacccgtccctcaagagtcgagtcaccatatcagtagacacgtccaagaaccagttctccctgaagctgagctctgtgaccgccgcggacac
ggccgtgtattactgtgcgcgcgaaggtccgtacgacggtttcgattcttggggtcaaggtactctggtgaccgtctcctcaactagtggccaggc
cggccagcaccatcaccatcaccatggcgcatacccgtacgacgttccggactacgcttct [SEQ ID NO: 745]
Amino Acid Sequence
QSVLTQPPSASGTPGQRVTISCSGSSSNIGSNTVNWYQQLPGTAPKLLIYSNNQRPSGVPDRF
SGSKSGTSASLAISGLQSEDEADYYCAAWDDSLNGYVFGTGTKVTVLGSRGGGGSGGGGS
GGGGSLEMAQVQLQQWGAGLLKPSETLSLTCAVYGGSFSGYYWSWIRQPPGKGLEWIGEI
NHSGSTNYNPSLKSRVTISVDTSKNQFSLKLSSVTAADTAVYYCAREGPYDGFDSWGQGTL
VTVSSTSGQAGQHHHHHHGAYPYDVPDYAS [SEQ ID NO: 746]

TABLE 154
ET200-002

DNA Sequence
aattttatgctgactcagccccactctgtgtcggagtctccggggaagac
ggtaaccatctcctgcacccgcagcagtggcagcattgccagcaactatg
tgcagtggtaccagcagcgcccgggcagtgcccccaccactgtgatctat
gaggataaccaaagaccctctggggtccctgatcggttctctggctccat
cgacagctcctccaactctgcctccctcaccatctctggactgaagactg
aggacgaggctgactactactgtcagtcttatgatagcagcaattctgtg
gtattcggcggagggaccaagctgaccgtcctaggttctagaggtggtgg
tggtagcggcggcggcggctctggtggtggtggatccctcgagatggccc
aggtccagctggtacagtctggcactgaggtgaagaagcctggggcctca
gtgagggtcgcctgcaaggcttctggttacccctttaacaaatatgacat
caactgggtgcgacaggcccctggacaagggcttgagtggatgggaggca
tcatccctatctttcgtacaacaaactacgcacagaagttccagggcaga
gtcacgattaccgcggacgaatccacgagcacagcctacatggagctgag
cagcctgagatctgaggacacggccgtatattactgtgcgcgcgaatggt
tctactgggatatctggggtcaaggtactctggtgaccgtctcctcaact
agtggccaggccggccagcaccatcaccatcaccatggcgcatacccgta
cgacgttccggactacgcttct [SEQ ID NO: 747]
Amino Acid Sequence
NFMLTQPHSVSESPGKTVTISCTRSSGSIASNYVQWYQQRPGSAPTTVIY
EDNQRPSGVPDRFSGSIDSSSNSASLTISGLKTEDEADYYCQSYDSSNSV
VFGGGTKLTVLGSRGGGGSGGGGSGGGGSLEMAQVQLVQSGTEVKKPGAS
VRVACKASGYPFNKYDINWVRQAPGQGLEWMGGIIPIFRTTNYAQKFQGR
VTITADESTSTAYMELSSLRSEDTAVYYCAREWFYWDIWGQGTLVTVSST
SGQAGQHHHHHHGAYPYDVPDYAS [SEQ ID NO: 748]

TABLE 155
ET200-003

DNA Sequence
cagtctgtgttgactcagccaccctcagtgtccgtgtccccaggacagac
agccagcatctcctgctctggaaataaattggggactaagtatgtttact
ggtatcagaagaggccaggccagtcccctgtgttggtcatgtatgaagat
aatcagcggccctcagggatcccggagcggttctctggctccaactctgg
gaacacagccactctgaccatcagagggacccagactgtggatgaggctg
actattactgtcaggcgtgggactccgacactttcgtggtcttcggcgga
gggaccaaggtcaccgtcctaggttctagaggtggtggtggtagcggcgg
cggcggctctggtggtggtggatccctcgagatggccgaggtgcagctgg
tggagaccgggggaggcgtggtccagcctgggaggtccctgagactctcc
tgtgcagcctctggattcaccttcagtagttatggcatgcactgggtccg
ccaggctccaggcaaggggctggagtgggtggcagttatatcacatgatg
gaagtaataaatactacgcagactccgtgaagggccgattcaccatctcc
agagacaattccaaggacacgctgtatctgcaaatgaacagcctgagagg
tgaggacacggccgtatattactgtgcgcgctctaaccagtggtctggtt
acttctctttcgattactggggtcaaggtactctggtgaccgtctcctca
actagtggccaggccggccagcaccatcaccatcaccatggcgcataccc
gtacgacgttccggactacgcttct [SEQ ID NO: 749]
Amino Acid Sequence
QSVLTQPPSVSVSPGQTASISCSGNKLGTKYVYWYQKRPGQSPVLVMYED
NQRPSGIPERFSGSNSGNTATLTIRGTQTVDEADYYCQAWDSDTFVVFGG
GTKVTVLGSRGGGGSGGGGSGGGGSLEMAEVQLVETGGGVVQPGRSLRLS
CAASGFTFSSYGMHWVRQAPGKGLEWVAVISHDGSNKYYADSVKGRFTIS
RDNSKDTLYLQMNSLRGEDTAVYYCARSNQWSGYFSFDYWGQGTLVTVSS
TSGQAGQHHHHHHGAYPYDVPDYAS [SEQ ID NO: 750]

TABLE 156
ET200-006

DNA Sequence
tcctatgtgctgactcagccaccctcagtgtcagtggccccaggaaagac
ggccaggattacctgtgggggaaacaacattggaagtaaaagtgtgcact
ggtaccagcagaagccaggccaggcccctgtggtggtcatccattatgat
agcgaccggccctcagggatccctgagcgattctctggctccaactctgg
gaacacggccaccctgaccatcagcagggtcgaagccggggatgaggccg
actattactgtcaggtgtgggatagtagtagtgatcatccttatgtcttc
ggaactgggaccaaggtcaccgtcctaggttctagaggtggtggtggtag
cggcggcggcggctctggtggtggtggatccctcgagatggccgaggtgc
agctggtgcagtctggagctgaggtgaagaagcctggggcctcagtgaag
gtctcctgcaaggcttctggttacacctttaccacctatggtatcagctg
ggtgcgacaggcccctggacaagggcttgagtggatgggatggatcaaca
cttacaatggtcacacaaactatgcacagaagctccagggcagagccaca
atgaccgcagacacatccacgaacacagcctacatggagctgaggagcct
gagatctgacgacactgccgtgtattactgtgcgcgcgttatctacggtt
ctggtgattactggggtcaaggtactctggtgaccgtctcctcaactagt
ggccaggccggccagcaccatcaccatcaccatggcgcatacccgtacga
cgttccggactacgcttct [SEQ ID NO: 751]
Amino Acid Sequence
SYVLTQPPSVSVAPGKTARITCGGNNIGSKSVHWYQQKPGQAPVVVIHYD
SDRPSGIPERFSGSNSGNTATLTISRVEAGDEADYYCQVWDSSSDHPYVF
GTGTKVTVLGSRGGGGSGGGGSGGGGSLEMAEVQLVQSGAEVKKPGASVK
VSCKASGYTFTTYGISWVRQAPGQGLEWMGWINTYNGHTNYAQKLQGRAT
MTADTSTNTAYMELRSLRSDDTAVYYCARVIYGSGDYWGQGTLVTVSSTS
GQAGQHHHHHHGAYPYDVPDYAS [SEQ ID NO: 752]

TABLE 157
ET200-007

DNA Sequence
tcctatgtgctgactcagccactctcagtgtcagtggccccaggaaagac
ggccaggattacctgtgggggaaacaacattggaagtaaaactgtgcact
ggtaccagcagaagccaggccaggcccctgtgctggtcatctattatgat
agcgaccggccctcagggatccctgagcgattctctggctccaactctgg
gaacacggccaccctgaccatcagcagggtcgaagccggggatgaggccg
actattactgtcaggtgtgggatagtagtagtgatcatcgggtgttcggc
ggagggaccaagctgaccgtcctaggttctagaggtggtggtggtagcgg
cggcggcggctctggtggtggtggatccctcgagatggcccaggtgcagc
tgcaggagtcgggcccaggactggtgaagccttcggagaccctgtccctc
acctgcaatgtctctggttactccatcagcagtggttacttttggggctg
gatccggcagcccccagggaaggggctggagtggattgggagtatctatc
atagtaggagcacctactacaacccgtccctcaagagtcgagtcaccata
tcagtagacacgtccaagaaccagttctccctgaagctgaactctgtgac
cgccgcagacacggccgtgtattactgtgcgcgcggttacggttacttcg
attactggggtcaaggtactctggtgaccgtctcctcaactagtggccag
gccggccagcaccatcaccatcaccatggcgcatacccgtacgacgttcc
ggactacgcttct [SEQ ID NO: 753]
Amino Acid Sequence
SYVLTQPLSVSVAPGKTARITCGGNNIGSKTVHWYQQKPGQAPVLVIYYD
SDRPSGIPERFSGSNSGNTATLTISRVEAGDEADYYCQVWDSSSDHRVFG
GGTKLTVLGSRGGGGSGGGGSGGGGSLEMAQVQLQESGPGLVKPSETLSL
TCNVSGYSISSGYFWGWIRQPPGKGLEWIGSIYHSRSTYYNPSLKSRVTI
SVDTSKNQFSLKLNSVTAADTAVYYCARGYGYFDYWGQGTLVTVSSTSGQ
AGQHHHHHHGAYPYDVPDYAS [SEQ ID NO: 754]

TABLE 158
ET200-008

DNA Sequence
caatctgccctgactcagcctgcctccgtgtctgggtctcctggacagtc
gatcaccatctcctgcactggaaccagcagtgacgttggtggttataact
atgtctcctggtaccaacaacacccaggcaaagcccccaaactcatgatt
tatgatgtcagtaatcggccctcaggggtttctaatcgcttctctggctc
caagtctggcaacacggcctccctgaccatctctgggctccaggctgagg
acgaggctgattattactgcagctcatatacaagcagcagcacttcgaag
gtgttcggcggagggaccaagctgaccgtcctaggttctagaggtggtgg
tggtagcggcggcggcggctctggtggtggtggatccctcgagatggccg
aggtgcagctggtggagtctgggggaggtgtggtacggcctggggggtcc
ctgagactctcctgtgcagcctctggattcacctttggtgattatggcat
gagctgggtccgccaagctccagggaaggggctggagtgggtctctggta
ttaattggaatggtggtagcacaggttatgcagactctgtgaagggccga
ttcaccatctccagagacaacgccaagaactccctgtatctgcaaatgaa
cagtctgagagccgaggacacggccgtatattactgtgcgcgctctaaat
acaacttccatgtttactacgattactggggtcaaggtactctggtgacc
gtctcctcaactagtggccaggccggccagcaccatcaccatcaccatgg
cgcatacccgtacgacgttccggactacgcttct [SEQ ID NO:
755]
Amino Acid Sequence
QSALTQPASVSGSPGQSITISCTGTSSDVGGYNYVSWYQQHPGKAPKLMI
YDVSNRPSGVSNRFSGSKSGNTASLTISGLQAEDEADYYCSSYTSSSTSK
VFGGGTKLTVLGSRGGGGSGGGGSGGGGSLEMAEVQLVESGGGVVRPGGS
LRLSCAASGFTFGDYGMSWVRQAPGKGLEWVSGINWNGGSTGYADSVKGR
FTISRDNAKNSLYLQMNSLRAEDTAVYYCARSKYNFHVYYDYWGQGTLVT
VSSTSGQAGQHHHHHHGAYPYDVPDYAS [SEQ ID NO: 756]

TABLE 159
ET200-009

DNA Sequence
cagtctgtgttgacgcagccaccctcagcgtctgggacccccgggcagac
agtcaccatctcttgttctggaagcaactccaacatcggaagtaattatg
tatactggtaccagcagctcccaggaacggcccccaaactcctcatctat
aggaataatcagcggccctcaggggtccctgaccgattctcaggctccaa
gtctggcacctcagcctccctggccatcagtgggctccgctccgaggatg
aggctgattattactgtgcagcatgggatgacagcctgagtgcttatgtc
ttcggaactgggaccaaggtcaccgtcctaggttctagaggtggtggtgg
tagcggcggcggcggctctggtggtggtggatccctcgagatggcccagg
tgcagctggtgcagtctggagctgaggtgaagaagcctggggcctcagtg
aaggtctcctgcaaggcttctggttacacctttaccagctatggtatcag
ctgggtgcgacaggcccctggacaagggcttgagtggatgggatggatca
gcgcttacaatggtaacacaaactatgcacagaagctccagggcagagtc
accatgaccacagacacatccacgagcacagcctacatggagctgaggag
cctgagatctgacgacactgccgtgtattactgtgcgcgctcttctggta
acatggtttcttggaaagatatgtggggtcaaggtactctggtgaccgtc
tcctcaactagtggccaggccggccagcaccatcaccatcaccatggcgc
atacccgtacgacgttccggactacgcttct [SEQ ID NO: 757]
Amino Acid Sequence
QSVLTQPPSASGTPGQTVTISCSGSNSNIGSNYVYWYQQLPGTAPKLLIY
RNNQRPSGVPDRFSGSKSGTSASLAISGLRSEDEADYYCAAWDDSLSAYV
FGTGTKVTVLGSRGGGGSGGGGSGGGGSLEMAQVQLVQSGAEVKKPGASV
KVSCKASGYTFTSYGISWVRQAPGQGLEWMGWISAYNGNTNYAQKLQGRV
TMTTDTSTSTAYMELRSLRSDDTAVYYCARSSGNMVSWKDMWGQGTLVTV
SSTSGQAGQHHHHHHGAYPYDVPDYAS [SEQ ID NO: 758]

TABLE 160
ET200-010

DNA Sequence
caatctgccctgactcagcctgcctccgtgtctgggtctcctggacagtc
gatcaccatctcctgcactggaaccagcagtgacgttggtggttataact
ctgtctcctggtaccaacaacacccaggcaaagcccccagactcatgatt
tatgatgtcagtaatcggccctcaggggtttctaatcgcttctctggctc
caagtctggcaacacggcctccctgaccatctctgggctccaggctgagg
acgaggctgattattactgcagctcatatacaagcagcagcaccccttta
gtcttcggaactgggaccaaggtcaccgtcctaggttctagaggtggtgg
tggtagcggcggcggcggctctggtggtggtggatccctcgagatggccc
aggtgcagctggtgcagtctggggctgaggtgaagaagcctggggcctca
gtgaaggtctcctgcaaggcttctggttacacctttaccagctatggtat
cagctgggtgcgacaggcccctggacaagggcttgagtggatgggatgga
tcagcgcttacaatggtaacacaaactatgcacagaagctccagggcaga
gtcaccatgaccacagacacatccacgagcacagcctacatggagctgag
gagcctgagatctgacgacacggccgtgtattactgtgcgcgcggtgctg
ttgcttaccatgattggggtcaaggtactctggtgaccgtctcctcaact
agtggccaggccggccagcaccatcaccatcaccatggcgcatacccgta
cgacgttccggactacgcttct [SEQ ID NO: 759]
Amino Acid Sequence
QSALTQPASVSGSPGQSITISCTGTSSDVGGYNSVSWYQQHPGKAPRLMI
YDVSNRPSGVSNRFSGSKSGNTASLTISGLQAEDEADYYCSSYTSSSTPL
VFGTGTKVTVLGSRGGGGSGGGGSGGGGSLEMAQVQLVQSGAEVKKPGAS
VKVSCKASGYTFTSYGISWVRQAPGQGLEWMGWISAYNGNTNYAQKLQGR
VTMTTDTSTSTAYMELRSLRSDDTAVYYCARGAVAYHDWGQGTLVTVSST
SGQAGQHHHHHHGAYPYDVPDYAS [SEQ ID NO: 760]

TABLE 161
ET200-011

DNA Sequence
cagtctgtcgtgacgcagccgccctcagtgtctgcggccccaggacagag
ggtcaccatctcctgctctggaagcagctccaacatttcgatttatgatg
tatcctggtatcagcagctcccaggaacagcccccaaactcctcatttat
ggcaataataagcgaccctcggggattgctgaccgattctctggctccac
gtctggcacgtcagccaccctgggcatcaccggactccagactggggacg
aggccgattattactgcggaacatgggatgacagtctgagtgggggggtg
ttcggcggagggaccaagctgaccgtcctaggttctagaggtggtggtgg
tagcggcggcggcggctctggtggtggtggatccctcgagatggcccaga
tgcagctggtgcaatctggggctgaggtgaagaagcctgggtcctcggtg
aaggtctcctgcgaggcttctggaggcaccctcagcagctatgctatcaa
ctgggtgcgacaggcccctggacaagggcttgagtggatgggagggatca
tccctatgtttggtacagcacactacgcacagaagttccagggcagagtc
acgattaccgcggacgaatccacgaaaacagcctacatggagctgagcag
cctgagatctgaggacactgccgtgtattactgtgcgcgcggtgttcatt
acgcttctttcgatcattggggtcaaggtactctggtgaccgtctcctca
actagtggccaggccggccagcaccatcaccatcaccatggcgcataccc
gtacgacgttccggactacgcttct [SEQ ID NO: 761]
Amino Acid Sequence
QSVVTQPPSVSAAPGQRVTISCSGSSSNISIYDVSWYQQLPGTAPKLLIY
GNNKRPSGIADRFSGSTSGTSATLGITGLQTGDEADYYCGTWDDSLSGGV
FGGGTKLTVLGSRGGGGSGGGGSGGGGSLEMAQMQLVQSGAEVKKPGSSV
KVSCEASGGTLSSYAINWVRQAPGQGLEWMGGIIPMFGTAHYAQKFQGRV
TITADESTKTAYMELSSLRSEDTAVYYCARGVHYASFDHWGQGTLVTVSS
TSGQAGQHHHHHHGAYPYDVPDYAS [SEQ ID NO: 762]

TABLE 162
ET200-012

DNA Sequence
cagtctgtgttgacgcagccgccctcagtgtctgcggccgcaggacagaa
ggtcaccatctcctgctctggaagcgactccaacattgggaataattatg
tgtcctggtatcaacacctcccagggacagcccccaaactcctcatttat
gacgttaaaaatcgaccctcagggattcctgaccggttctccggctccaa
gtctggctcgtcagccaccctaggcatcgccggactccagcctggggacg
aggccgattattactgcggaacatgggacagtcggctggatgcctatgtc
ttcggaactgggaccaaggtcaccgtcctaggttctagaggtggtggtgg
tagcggcggcggcggctctggtggtggtggatccctcgagatggcccaga
tgcagctggtgcaatctggagctgaggtgaagaagcctggggcctcagtg
aaggtctcctgcaagacttctggtttcccctttaatatctttggaatcac
ctgggtgcgacaggcccctggacaagggcttgagtggatgggatggatca
gcggttacaacggtaacacagactacccacagaagttccagggcagagtc
accatgtccacagacacatccacgagtacagcctacatggagctgaggaa
cctgaaatctgacgacacggccgtgtattactgtgcgcgcggtgcttacg
gtggtatggatacttggggtcaaggtactctggtgaccgtctcctcaact
agtggccaggccggccagcaccatcaccatcaccatggcgcatacccgta
cgacgttccggactacgcttct [SEQ ID NO: 763]
Amino Acid Sequence
QSVLTQPPSVSAAAGQKVTISCSGSDSNIGNNYVSWYQHLPGTAPKLLIY
DVKNRPSGIPDRFSGSKSGSSATLGIAGLQPGDEADYYCGTWDSRLDAYV
FGTGTKVTVLGSRGGGGSGGGGSGGGGSLEMAQMQLVQSGAEVKKPGASV
KVSCKTSGFPFNIFGITWVRQAPGQGLEWMGWISGYNGNTDYPQKFQGRV
TMSTDTSTSTAYMELRNLKSDDTAVYYCARGAYGGMDTWGQGTLVTVSST
SGQAGQHHHHHHGAYPYDVPDYAS [SEQ ID NO: 764]

TABLE 163
ET200-013

DNA Sequence
cagtctgtcgtgacgcagccgccctcagtgtctggggccccagggcagag
ggtcaccatctcctgcactgggagcacctccaacatcggggcaggttatg
atgtacactggtatcagcagcttccaggaacagcccccaaactcctcatc
tatactaacaactttcggccctcaggggtccctgaccgattctctgcctc
caagtctggcacttcagcttccctggccatcactggtctccaggctgagg
atgaggctgattattactgcggaacatgggatagcagcctgagtgccgtt
gtgttcggcggagggaccaagctgaccgtcctaggttctagaggtggtgg
tggtagcggcggcggcggctctggtggtggtggatccctcgagatggccg
aggtgcagctggtggagtctggaactgaggtgaagaagcctggggcctca
gtgaaagtctcctgcaaggcttctggttacatgtttaccagttatggtct
caactgggtgcgacaggcccctggacaagggcttgagtggatgggatgga
tcagcgctaacaatggtaagacaaattatgctaagaaattccaggacaga
gtcaccatgaccagagacacttccacgagcacaggctacatggaactgag
gagcctgagatctgacgacacggccgtatattactgtgcgcgccatatcg
gtggttcttacttcgatcgttggggtcaaggtactctggtgaccgtctcc
tcaactagtggccaggccggccagcaccatcaccatcaccatggcgcata
cccgtacgacgttccggactacgcttct [SEQ ID NO: 765]
Amino Acid Sequence
QSVVTQPPSVSGAPGQRVTISCTGSTSNIGAGYDVHWYQQLPGTAPKLLI
YTNNFRPSGVPDRFSASKSGTSASLAITGLQAEDEADYYCGTWDSSLSAV
VFGGGTKLTVLGSRGGGGSGGGGSGGGGSLEMAEVQLVESGTEVKKPGAS
VKVSCKASGYMFTSYGLNWVRQAPGQGLEWMGWISANNGKTNYAKKFQDR
VTMTRDTSTSTGYMELRSLRSDDTAVYYCARHIGGSYFDRWGQGTLVTVS
STSGQAGQHHHHHHGAYPYDVPDYAS [SEQ ID NO: 766]

TABLE 164
ET200-014

DNA Sequence
tcctatgtgctgactcagccaccctcagtgtcagtggccccaggaaagac
ggccaggattacctgtgggggaaacaacattggaagtaaaagtgtgcact
ggtaccagcagaagccaggccaggcccctgtgctggtcatctattatgat
agcgaccggccctcagggatccctgagcgattctctggctccaactctgg
gaacacggccaccctgaccatcagcagggtcgaagccggggatgaggccg
actattactgtcaggtgtgggatagtagtagtgatcattatgtcttcgga
actgggaccaaggtcaccgtcctaggttctagaggtggtggtggtagcgg
cggcggcggctctggtggtggtggatccctcgagatggccgaggtgcagc
tggtggagactgggggaggcttggtacagcctggggggtccctgagactc
tcctgtgcagcctctggattcacctttagcagctatgccatgagctgggt
ccgccaggctccagggaaggggctggagtgggtctcagctattagtggta
gtgatggtagcacatactacgcagactccgtgaagggccggttcaccatc
tccagagacaattccaagaacacgctgtatctgcaaatgaacagcctgag
agacgaggacacggccgtatattactgtgcgcgctctcatgaagctaacc
tggttggtgattggtggggtcaaggtactctggtgaccgtctcctcaact
agtggccaggccggccagcaccatcaccatcaccatggcgcatacccgta
cgacgttccggactacgcttct [SEQ ID NO: 767]
Amino Acid Sequence
SYVLTQPPSVSVAPGKTARITCGGNNIGSKSVHWYQQKPGQAPVLVIYYD
SDRPSGIPERFSGSNSGNTATLTISRVEAGDEADYYCQVWDSSSDHYVFG
TGTKVTVLGSRGGGGSGGGGSGGGGSLEMAEVQLVETGGGLVQPGGSLRL
SCAASGFTFSSYAMSWVRQAPGKGLEWVSAISGSDGSTYYADSVKGRFTI
SRDNSKNTLYLQMNSLRDEDTAVYYCARSHEANLVGDWWGQGTLVTVSST
SGQAGQHHHHHHGAYPYDVPDYAS [SEQ ID NO: 768]

TABLE 165
ET200-015

DNA Sequence
cagtctgtggtgactcagccaccctcagtgtcagtggccccaggaaagac
ggccaggattacctgtgggggaaacaacattggaagtaaaagtgtgcact
ggtaccagcagaagccaggccaggcccctgtgctggtcatctattatgat
agcgaccggccctcagggatccctgagcgattctctggctccaactctgg
gaacacggccaccctgaccatcagcagggtcgaagccggggatgaggccg
actattactgtcaggtgtgggatagtagtagtgatgtggtattcggcgga
gggaccaagctgaccgtcctaggttctagaggtggtggtggtagcggcgg
cggcggctctggtggtggtggatccctcgagatggccgaggtccagctgg
tacagtctggagctgaggtgaagaagcctggggcctcagtgaaggtctcc
tgcaaggcttctggttacacctttaccagctacggtatcagctgggtgcg
acaggcccctggacaagggcttgagtggatgggatggatcagcgcttaca
atggtaacacaaactatgcacagaagctccagggcagagtcaccatgacc
acagacacatccacgagcacagcctacatggagctgaggagcctgagatc
tgacgacacggccgtgtattactgtgcgcgctggggtggtttcggtgctg
ttgatcattggggtcaaggtactctggtgaccgtctcctcaactagtggc
caggccggccagcaccatcaccatcaccatggcgcatacccgtacgacgt
tccggactacgcttct [SEQ ID NO: 769]
Amino Acid Sequence
QSVVTQPPSVSVAPGKTARITCGGNNIGSKSVHWYQQKPGQAPVLVIYYD
SDRPSGIPERFSGSNSGNTATLTISRVEAGDEADYYCQVWDSSSDVVFGG
GTKLTVLGSRGGGGSGGGGSGGGGSLEMAEVQLVQSGAEVKKPGASVKVS
CKASGYTFTSYGISWVRQAPGQGLEWMGWISAYNGNTNYAQKLQGRVTMT
TDTSTSTAYMELRSLRSDDTAVYYCARWGGFGAVDHWGQGTLVTVSSTSG
QAGQHHHHHHGAYPYDVPDYAS [SEQ ID NO: 770]

TABLE 166
ET200-016

DNA Sequence
tcttctgagctgactcaggaccctgctgtgtctgtggccttgggacagac
agtcaagatcacgtgccaaggagacagcctcacagactaccatgcaacct
ggtaccagcagaagccaggacaggcccctgtcgctgtcatctatgctaca
aacaaccggcccactgggatcccagaccgattctctggttccagttccgg
aaacacagcttctttgaccatcactggggctcaggcggaagatgaggctg
actattactgtaattcccgggacagcggcacggacgaagtgttattcggc
ggagggaccaagctgaccgtcctaggttctagaggtggtggtggtagcgg
cggcggcggctctggtggtggtggatccctcgagatggccgaggtgcagc
tggtggagactgggggaggcctggtcaagcctggggggtccctgagactc
tcctgtgcagcctctggattcaccttcagtagctatagcatgaactgggt
ccgccaggctccagggaaggggctggagtgggtctcatccattagtagta
gtagtagttacatatactacgcagactcagtgaagggccgattcaccatc
tccagagacaacgccaagaactcactgtatctgcaaatgaacagcctgag
agccgaggacacggccgtgtattactgtgcgcgcggtcagggttacgatt
actggggtcaaggtactctggtgaccgtctcctcaactagtggccaggcc
ggccagcaccatcaccatcaccatggcgcatacccgtacgacgttccgga
ctacgcttct [SEQ ID NO: 771]
Amino Acid Sequence
SSELTQDPAVSVALGQTVKITCQGDSLTDYHATWYQQKPGQAPVAVIYAT
NNRPTGIPDRFSGSSSGNTASLTITGAQAEDEADYYCNSRDSGTDEVLFG
GGTKLTVLGSRGGGGSGGGGSGGGGSLEMAEVQLVETGGGLVKPGGSLRL
SCAASGFTFSSYSMNWVRQAPGKGLEWVSSISSSSSYIYYADSVKGRFTI
SRDNAKNSLYLQMNSLRAEDTAVYYCARGQGYDYWGQGTLVTVSSTSGQA
GQHHHHHHGAYPYDVPDYAS [SEQ ID NO: 772]

TABLE 167
ET200-017

DNA Sequence
Tcctatgtgctgactcagccaccctcggtgtcagtggccccaggaaagac
ggccaggattacctgtgggggaaacaacattggaagtaaaagtgtgcact
ggtaccagcagaagccaggccaggcccctgtgctggtcgtctatgatgat
agcgaccggccctcagggatccctgagcgattctctggctccaactctgg
gaacacggccaccctgagcatcagcagggtcgaagccggggatgaggccg
actattactgtcaggtgtgggatagtagtagtgatcatactgtcttcgga
actgggaccaaggtcaccgtcctaggttctagaggtggtggtggtagcgg
cggcggcggctctggtggtggtggatccctcgagatggcccaggtgcagc
tacagcagtggggcgcaggactgttgaagccttcggagaccctgtccctc
acctgcgctgtctatggtgggtccttcagtggttactactggagctggat
ccgccagcccccagggaaggggctggagtggattggggaaatcaatcata
agtggaagcaccaactacaacccgtccctcaaggtcgagtcaccatatca
gtagacacgtccaagaaccagttctccctgaagctgagctctgtgaccgc
cgcggacacggccgtgtattactgtgcgcgctactacccgggtatggata
tgtggggtcaaggtactctggtgaccgtctcctcaactagtggccaggcc
ggccagcaccatcaccatcaccatggcgcatacccgtacgacgttccgga
ctacgcttct [SEQ ID NO: 773]
Amino Acid Sequence
SYVLTQPPSVSVAPGKTARITCGGNNIGSKSVHWYQQKPGQAPVLVVYDD
SDRPSGIPERFSGSNSGNTATLSISRVEAGDEADYYCQVWDSSSDHTVFG
TGTKVTVLGSRGGGGSGGGGSGGGGSLEMAQVQLQQWGAGLLKPSETLSL
TCAVYGGSFSGYYWSWIRQPPGKGLEWIGEINHSGSTNYNPSLKSRVTIS
VDTSKNQFSLKLSSVTAADTAVYYCARYYPGMDMWGQGTLVTVSSTSGQA
GQHHHHHHGAYPYDVPDYAS [SEQ ID NO: 774]

TABLE 168
ET200-018

DNA Sequence
Caggctgtgctgactcagccgccctcaacgtctgggacccccgggcagag
ggtcaccatctcttgttctggaagcagctccaacatcgggagaaatggtg
taaactggtaccagcagctcccaggagcggcccccaaagtcctcatctat
aatgataatcagcgaccctcaggggtccctgaccgagtctctggctccca
gtctggctcctcaggcaccctggccatcgatgggcttcggtctgaggatg
aggctgattattactgtgcggcatgggatgacagcctgcatggtgtggta
ttcggcggagggaccaagctgaccgtcctaggttctagaggtggtggtgg
tagcggcggcggcggctctggtggtggtggatccctcgagatggcccagg
tccagctggtacagtctggggctgaggtgaagaagcctggggcctcagtg
aaggtctcctgcaaggtttccggatacaccctcaatgaattatccatgca
ctgggtgcgacaggctcctggaaaagggcttgagtggatgggaggttttg
atcctgaagatggtgaaacaatctacgcacagaagttccagggcagagtc
accatgaccgaggacacatctacagacacagcctacatggagctgagcag
cctgagatctgaggacactgccgtgtattactgtgcgcgcggtggttacg
gtgattcttggggtcaaggtactctggtgaccgtctcctcaactagtggc
caggccggccagcaccatcaccatcaccatggcgcatacccgtacgacgt
tccggactacgcttct [SEQ ID NO: 775]
Amino Acid Sequence
QAVLTQPPSTSGTPGQRVTISCSGSSSNIGRNGVNWYQQLPGAAPKVLIY
NDNQRPSGVPDRVSGSQSGSSGTLAIDGLRSEDEADYYCAAWDDSLHGVV
FGGGTKLTVLGSRGGGGSGGGGSGGGGSLEMAQVQLVQSGAEVKKPGASV
KVSCKVSGYTLNELSMHWVRQAPGKGLEWMGGFDPEDGETIYAQKFQGRV
TMTEDTSTDTAYMELSSLRSEDTAVYYCARGGYGDSWGQGTLVTVSSTSG
QAGQHHHHHHGAYPYDVPDYAS [SEQ ID NO: 776]

TABLE 169
ET200-019

DNA Sequence
Aattttatgctgactcagccccactctgtgtcggagtctccggggaagac
ggtaaccatctcctgcacccgcagcagtggcagcattgccagcaactatg
tgcagtggtaccagcagcgcccgggcagtgcccccaccactgtgatctat
gaggataaccaaagaccctctggggtccctgatcggttctctggctccat
cgacagctcctccaactctgcctccctcaccatctctggactgaagactg
aggacgaggctgactactactgtcagtcttatgatagcagcaattcttgg
gtgttcggcggagggaccaagctgaccgtcctaggttctagaggtggtgg
tggtagcggcggcggcggctctggtggtggtggatccctcgagatggccc
aggtgcagctggtgcaatctggggctgaggtgaagaggcctgggtcctcg
gtgaaggtctcctgcacggcttctggaggcaccttcagcagcgatgctat
cagctgggtgcgacaggcccctggacaagggcttgagtggatgggaggaa
tcatccctatgtttggtacagcaaactacgcacagaagttccagggcaga
gtcacgattaccgcggacgaatccacgagcacagcctacatggagctgag
cagcctgagatctgaggacacggccgtgtattactgtgcgcgcgaaggtt
actactacccgtctgcttacctgggttctgttctgaacgacatctcttct
gtttacgatgaatggggtcaaggtactctggtgaccgtctcctcaactag
tggccaggccggccagcaccatcaccatcaccatggcgcata
cccgtacgacgttccggactacgcttct [SEQ ID NO: 777]
Amino Acid Sequence
NFMLTQPHSVSESPGKTVTISCTRSSGSIASNYVQWYQQRPGSAPTTVIY
EDNQRPSGVPDRFSGSIDSSSNSASLTISGLKTEDEADYYCQSYDSSNSW
VFGGGTKLTVLGSRGGGGSGGGGSGGGGSLEMAQVQLVQSGAEVKRPGSS
VKVSCTASGGTFSSDAISWVRQAPGQGLEWMGGIIPMFGTANYAQKFQGR
VTITADESTSTAYMELSSLRSEDTAVYYCAREGYYYPSAYLGSVLNDISS
VYDEWGQGTLVTVSSTSGQAGQHHHHHHGAYPYDVPDYAS
[SEQ ID NO: 778]

TABLE 170
ET200-020

DNA Sequence
Cagtctgtcgtgacgcagccgccctcagtgtctgcggccccaggacagaa
ggtcaccatctcctgctctggaagcacctccaacattggaaataatgatg
tatcctggtaccagcagctcccaggaacagcccccaaactcctcatttat
gacaataataagcgaccctcagggattcctgaccgattctctggctccaa
gtctggcacgtcagccaccctgggcatcaccggactccagactggggacg
aggccgattattactgcggaacatgggatagcagcgtgagtgcttcttgg
gtcttcggcagagggaccaagctgaccgtcctaggttctagaggtggtgg
tggtagcggcggcggcggctctggtggtggtggatccctcgagatggccc
aggtgcagctggtgcagtctggagctgaggtgaagaagcctggggcctca
gtgaaggtctcctgcaaggcttctggttacacctttaccagctatggtat
cagctgggtgcgacaggcccctggacaagggcttgagtggatgggatgga
tcagcgcttacaatggtaacacaaactatccacagaagctccagggcaga
gtcaccatgaccacagacccatccacgagcacagcctacatggagctgag
gagcctgagatctgacgacacggccgtgtattactgtgcgcgctctatga
cttctttcgattactggggtcaaggtactctggtgaccgtctcctcaact
agtggccaggccggccagcaccatcaccatcaccatggcgcatacccgta
cgacgttccggactacgcttct [SEQ ID NO: 779]
Amino Acid Sequence
QSVVTQPPSVSAAPGQKVTISCSGSTSNIGNNDVSWYQQLPGTAPKLLIY
DNNKRPSGIPDRFSGSKSGTSATLGITGLQTGDEADYYCGTWDSSVSASW
VFGRGTKLTVLGSRGGGGSGGGGSGGGGSLEMAQVQLVQSGAEVKKPGAS
VKVSCKASGYTFTSYGISWVRQAPGQGLEWMGWISAYNGNTNYPQKLQGR
VTMTTDPSTSTAYMELRSLRSDDTAVYYCARSMTSFDYWGQGTLVTVSST
SGQAGQHHHHHHGAYPYDVPDYAS [SEQ ID NO: 780]

TABLE 171
ET200-021

DNA Sequence
Cagtctgtgttgacgcagccgccctcagtgtctgcggccccaggacagaa
ggtcaccatctcctgctctggaagcaactccaacattgggaataattatg
tatcctggtatcagcaactcccagggacagcccccaaactcctcatttat
gacaataataagcgaccctcagggattcctgaccgattctctggctccag
gtctggcacgtcagccaccctgggcatcaccggactccagactggggacg
aggccgattattactgcggaacatggaataccactgtgactcctggctat
gtcttcggaactgggaccaaggtcaccgtcctaggttctagaggtggtgg
tggtagcggcggcggcggctctggtggtggtggatccctcgagatggccg
aagtgcagctggtgcagtctggagctgaggtgaagaagcctggggcctca
gtgaaggtctcctgcaaggcttctggttacacctttaccagctatggtat
cagctgggtgcgacaggcccctggacaagggcttgagtggatgggatgga
tcagcgcttacaatggtaacacaaactatgcacagaagctccagggcaga
gtcaccatgaccacagacacatccacgagcacagcctacatggagctgag
gagcctgagatctgacgacaccgccatgtattactgtgcgcgctctgttt
acgacctggatacttggggtcaaggtactctggtgaccgtctcctcaact
agtggccaggccggccagcaccatcaccatcaccatggcgcatacccgta
cgacgttccggactacgcttct [SEQ ID NO: 781]
Amino Acid Sequence
QSVLTQPPSVSAAPGQKVTISCSGSNSNIGNNYVSWYQQLPGTAPKLLIY
DNNKRPSGIPDRFSGSRSGTSATLGITGLQTGDEADYYCGTWNTTVTPGY
VFGTGTKVTVLGSRGGGGSGGGGSGGGGSLEMAEVQLVQSGAEVKKPGAS
VKVSCKASGYTFTSYGISWVRQAPGQGLEWMGWISAYNGNTNYAQKLQGR
VTMTTDTSTSTAYMELRSLRSDDTAMYYCARSVYDLDTWGQGTLVTVSST
SGQAGQHHHHHHGAYPYDVPDYAS [SEQ ID NO: 782]

TABLE 172
ET200-022

DNA Sequence
cagtctgtcgtgacgcagccgccctcagtgtctgcggccccaggacagaa
ggtcaccatctcctgctctggaagcagctccaacattgggaataattatg
tatcctggtaccagcagctcccaggaacagcccccaaactcctcatttat
gacaataataagcgaccctcagggattcctgaccgattctctggctccaa
gtctggcacgtcagccaccctgggcatcaccggactccagactggggacg
aggccgattattactgcggaacatgggatagcagcctgggggccccttat
gtcttcggaactgggaccaaggtcaccgtcctaggttctagaggtggtgg
tggtagcggcggcggcggctctggtggtggtggatccctcgagatggccg
aggtgcagctggtgcagtcttggggaggctcggaacagcctggcaggtcc
ctgagactctcctgtgcagcctctggattcacctttgatgattatgccat
gcactgggtccggcaagctccagggaagggcctggagtgggtctcaggta
ttagttggaatagcggtagcataggctatgcggactctgtgaagggccga
ttcaccatctccagagacaacgccaagaattccctgtatctgcaaatgaa
cagtctgagagctgaggacaccgccatgtattactgtgcgcgctaccgtc
aggttggttctgcttacgattcttggggtcaaggtactctggtgaccgtc
tcctcaactagtggccaggccggccagcaccatcaccatcaccatggcgc
atacccgtacgacgttccggactacgcttct [SEQ ID NO: 783]
Amino Acid Sequence
QSVVTQPPSVSAAPGQKVTISCSGSSSNIGNNYVSWYQQLPGTAPKLLIY
DNNKRPSGIPDRFSGSKSGTSATLGITGLQTGDEADYYCGTWDSSLGAPY
VFGTGTKVTVLGSRGGGGSGGGGSGGGGSLEMAEVQLVQSWGGSEQPGRS
LRLSCAASGFTFDDYAMHWVRQAPGKGLEWVSGISWNSGSIGYADSVKGR
FTISRDNAKNSLYLQMNSLRAEDTAMYYCARYRQVGSAYDSWGQGTLVTV
SSTSGQAGQHHHHHHGAYPYDVPDYAS [SEQ ID NO: 784]

TABLE 173
ET200-023

DNA Sequence
ctgcctgtgctgactcagccaccctcggtgtcagtggccccaggaaagac
ggccaggattacctgtgggggaaacaacattggaagtaaaagtgtgcact
ggtatcagcagaagccaggccaggcccctgtgctggtcgtctatgctgat
agcgaccggccctcagggatccctgagcgattctctggctccaactctgg
gaacacggccaccctgaccatcagcagggtcgaagccggggatgaggccg
actattactgtcaggtgtgggatagtagtagttatcataattatgtcttc
ggaactgggaccaaggtcaccgtcctaggttctagaggtggtggtggtag
cggcggcggcggctctggtggtggtggatccctcgagatggccgaggtgc
agctggtgcagtctggagctgaggtgaagaagcctggggcctcagtgaag
gtctcctgcaaggcttctggttacacctttaccagctatggtatcagctg
ggtgcgacaggcccctggacaagggcttgagtggatgggatggatcagcg
cttacaatggtaacacaaactatgcacagaagctccagggcagagtcacc
atgaccacagacacatccacgagcacagcctacatggagctgagcagcct
gagatctgaggacaccgccatgtattactgtgcgcgctactggggtttcg
gtgtttctgatcgttggggtcaaggtactctggtgaccgtctcctcaact
agtggccaggccggccagcaccatcaccatcaccatggcgcatacccgta
cgacgttccggactacgcttct [SEQ ID NO: 785]
Amino Acid Sequence
LPVLTQPPSVSVAPGKTARITCGGNNIGSKSVHWYQQKPGQAPVLVVYAD
SDRPSGIPERFSGSNSGNTATLTISRVEAGDEADYYCQVWDSSSYHNYVF
GTGTKVTVLGSRGGGGSGGGGSGGGGSLEMAEVQLVQSGAEVKKPGASVK
VSCKASGYTFTSYGISWVRQAPGQGLEWMGWISAYNGNTNYAQKLQGRVT
TMTDTSTSTAYMELSSLRSEDTAMYYCARYWGFGVSDRWGQGTLVTVSST
SGQAGQHHHHHHGAYPYDVPDYAS [SEQ ID NO: 786]

TABLE 174
ET200-024

DNA Sequence
aattttatgctgactcagccccactctgtgtcggagtctccggggaagac
ggtaaccatctcctgcaccggcagcagtggcagcattgccagcaactatg
tgcagtggtaccagcagcgcccgggcagtgcccccaccactgtgatctat
gaggataaccaaagaccctctggggtccccgatcggttctctggctccat
cgacagctcctccaactctgcctccctcaccatctctggactgaagactg
aggacgaggctgactactactgtcagtcttatgacagcagcaatctttgg
gtgttcggcggagggaccaagctgaccgtcctaggttctagaggtggtgg
tggtagcggcggcggcggctctggtggtggtggatccctcgagatggccc
agatgcagctggtgcagtctggggctgaggtgaagaagcctgggtcctcg
gtgaaggtctcctgcaaggcttctggaggcaccttcagcagctatgctat
cagctgggtgcgacaggcccctggacaagggcttgagtggatgggaggga
tcatccctatctttggtacagcaaactacgcacagaagttccagggcaga
gtcacgattaccgcggacgaatccacgagcacagcctacatggagctgag
cagcctgagatctgaggacactgccgtgtattactgtgcgcgctacaact
actactactacgattcttggggtcaaggtactctggtgaccgtctcctca
actagtggccaggccggccagcaccatcaccatcaccatggcgcataccc
gtacgacgttccggactacgcttct [SEQ ID NO: 787]
Amino Acid Sequence
NFMLTQPHSVSESPGKTVTISCTGSSGSIASNYVQWYQQRPGSAPTTVIY
EDNQRPSGVPDRFSGSIDSSSNSASLTISGLKTEDEADYYCQSYDSSNLW
VFGGGTKLTVLGSRGGGGSGGGGSGGGGSLEMAQMQLVQSGAEVKKPGSS
VKVSCKASGGTFSSYAISWVRQAPGQGLEWMGGIIPIFGTANYAQKFQGR
VTITADESTSTAYMELSSLRSEDTAVYYCARYNYYYYDSWGQGTLVTVSS
TSGQAGQHHHHHHGAYPYDVPDYAS [SEQ ID NO: 788]

TABLE 175
ET200-025

DNA Sequence
gacatccagatgacccagtctccatcctccctgtctgcatctgtaggaga
cagagtcaccatcacttgccgggcaagtcagagcattagcagctatttaa
attggtatcagcagaaaccagggaaagcccctaagctcctgatctatgct
gcatccagtttgcaaagtggggtcccatcaaggttcagtggcagtggatc
tgggacagatttcactctcaccatcagcagtctgcaacctgaagattttg
caacttactactgtcaacagagttacagtaccccattcactttcggccct
gggaccaaagtggatatcaaacgttctagaggtggtggtggtagcggcgg
cggcggctctggtggtggtggatccctcgagatggccgaggtgcagctgg
tgcagtctggggctgaggtgaagaagcctgggtcctcggtgaaggtctcc
tgcaaggcttctggaggcaccttcagcagctatgctatcagctgggtgcg
acaggcccctggacaagggcttgagtggatgggagggatcatccctatct
ttggtacagcaaactacgcacagaagttccagggcagagtcacgattacc
gcggacgaatccacgagcacagcctacatggagctgagcagcctgagatc
tgaggacaccgccatgtattactgtgcgcgctactggggttacgactctt
acgatgaatggggtcaaggtactctggtgaccgtctcctcaactagtggc
caggccggccagcaccatcaccatcaccatggcgcatacccgtacgacgt
tccggactacgcttct [SEQ ID NO: 789]
Amino Acid Sequence
DIQMTQSPSSLSASVGDRVTITCRASQSISSYLNWYQQKPGKAPKLLIYA
ASSLQSGVPSRFSGSGSGTDFTLTISSLQPEDFATYYCQQSYSTPFTFGP
GTKVDIKRSRGGGGSGGGGSGGGGSLEMAEVQLVQSGAEVKKPGSSVKVS
CKASGGTFSSYAISWVRQAPGQGLEWMGGIIPIFGTANYAQKFQGRVTIT
ADESTSTAYMELSSLRSEDTAMYYCARYWGYDSYDEWGQGTLVTVSSTSG
QAGQHHHHHHGAYPYDVPDYAS [SEQ ID NO: 790]

TABLE 176
ET200-026

DNA Sequence
aattttatgctgactcagccccactctgtgtcggagtctccggggaagac
ggtaaccatctcctgcaccggcagcagtggcagcattgccagcaactatg
tgcagtggtaccagcagcgcccgggcagtgcccccaccactgtgatctat
gaggataaccaaagaccctctggggtccctgatcggttctctggctccat
cgacagctcctccaactctgcctccctcaccatctctggactgaagactg
aggacgaggctgactactactgtcagtcttatgatagcagcaattgggtg
ttcggcggagggaccaagctgaccgtcctaggttctagaggtggtggtgg
tagcggcggcggcggctctggtggtggtggatccctcgagatggccgagg
tccagctggtgcagtctggggctgaggtgaagaagcctgggtcctcggtg
aaggtctcctgcaaggcttctggaggcaccttcagcagctatgctatcag
ctgggtgcgacaggcccctggacaagggcttgagtggatgggagggatca
tccctatctttggtacagcaaactacgcacagaagttccagggcagagtc
acgattaccgcggacgaatccacgagcacagcctacatggagctgagcag
cctgagatctgaggacacggccgtgtattactgtgcgcgcaacaaccatt
actacaacgattactggggtcaaggtactctggtgaccgtctcctcaact
agtggccaggccggccagcaccatcaccatcaccatggcgcatacccgta
cgacgttccggactacgcttct [SEQ ID NO: 791]
Amino Acid Sequence
NFMLTQPHSVSESPGKTVTISCTGSSGSIASNYVQWYQQRPGSAPTTVIY
EDNQRPSGVPDRFSGSIDSSSNSASLTISGLKTEDEADYYCQSYDSSNWV
FGGGTKLTVLGSRGGGGSGGGGSGGGGSLEMAEVQLVQSGAEVKKPGSSV
KVSCKASGGTFSSYAISWVRQAPGQGLEWMGGIIPIFGTANYAQKFQGRV
TITADESTSTAYMELSSLRSEDTAVYYCARNNHYYNDYWGQGTLVTVSST
SGQAGQHHHHHHGAYPYDVPDYAS [SEQ ID NO: 792]

TABLE 177
ET200-027

DNA Sequence
cagtctgtgttgacgcagccgccctcagtgtctggggccccagggcaggg
ggtcaccatcccctgcactgggagcagctccaacatcggggcaggttatg
atgtacactggtaccagcagcttccagggacagcccccaaactcctcatc
tatggtaacaacaatcggccctcaggggtccctgaccgcttctctggctc
caggtctggctcctcagcctccctggccatcactgggctccaggctgagg
atgaggctgattattactgccagtcctatgacagcagcctgagtgatgtg
gtattcggcggagggaccaaggtcaccgtcctaggttctagaggtggtgg
tggtagcggcggcggcggctctggtggtggtggatccctcgagatggccg
aggtccagctggtgcagtctggggctgaggtgaagaagcctggggctaca
gtgaaaatctcctgcaaggtttctggatacaccttcaccgactactacat
gcactgggtgcaacaggcccctggaaaagggcttgagtggatgggacttg
ttgatcctgaagatggtgaaacaatatacgcagagaagttccagggcaga
gtcaccataaccgcggacacgtctacagacacagcctacatggagctgag
cagcctgagatctgaggacacggccgtgtattactgtgcgcgctactggt
cttactctttcgactacctgtacatgccggaaggtaacgattggtggggt
caaggtactctggtgaccgtctcctcaactagtggccaggccggccagca
ccatcaccatcaccatggcgcatacccgtacgacgttccggactacgctt
ct [SEQ ID NO: 793]
Amino Acid Sequence
QSVLTQPPSVSGAPGQGVTIPCTGSSSNIGAGYDVHWYQQLPGTAPKLLI
YGNNNRPSGVPDRFSGSRSGSSASLAITGLQAEDEADYYCQSYDSSLSDV
VFGGGTKVTVLGSRGGGGSGGGGSGGGGSLEMAEVQLVQSGAEVKKPGAT
VKISCKVSGYTFTDYYMHWVQQAPGKGLEWMGLVDPEDGETIYAEKFQGR
VTITADTSTDTAYMELSSLRSEDTAVYYCARYWSYSFDYLYMPEGNDWWG
QGTLVTVSSTSGQAGQHHHHHHGAYPYDVPDYAS
[SEQ ID NO: 794]

TABLE 178
ET200-028

DNA Sequence
cagtctgtgttgactcagccacccgcagcgtctgggacccccggacagag
agtcaccatctcttgttctgggggcgtctccaacatcgggagtggtgctc
taaattggtaccagcaactcccaggaacggcccccaaactcctcatctat
agttacaatcagcggccctcaggggtctctgaccgattctctggctccag
gtctgccacctcagcctccctggccatcagtgggctccagtctgaggatg
aggctgattattactgtgcaacctgggatgatagtgtgaatggttgggtg
ttcggcggagggaccaagctgaccgtcctaggttctagaggtggtggtgg
tagcggcggcggcggctctggtggtggtggatccctcgagatggcccagg
tccagctggtacagtctggagctgaggtgaagaagcctggggattcagtg
aaggtctcctgcaagccttctggttacaattttctcaactatggtatcaa
ctgggtgcgacaggcccctggacaagggcttgagtggatgggatggatta
gcacttacaccggtaacacaaactatgcacagaagctgcagggcagagtc
accttcaccacagacacatccacgagcacagcctacatggagatgaggag
cctgagatctgacgacacggccgtgtattactgtgcgcgcgacctgtact
actacgaaggtgttgattactggggtcaaggtactctggtgaccgtctcc
tcaactagtggccaggccggccagcaccatcaccatcaccatggcgcata
cccgtacgacgttccggactacgcttct [SEQ ID NO: 795]
Amino Acid Sequence
QSVLTQPPAASGTPGQRVTISCSGGVSNIGSGALNWYQQLPGTAPKLLIY
SYNQRPSGVSDRFSGSRSATSASLAISGLQSEDEADYYCATWDDSVNGWV
FGGGTKLTVLGSRGGGGSGGGGSGGGGSLEMAQVQLVQSGAEVKKPGDSV
KVSCKPSGYNFLNYGINWVRQAPGQGLEWMGWISTYTGNTNYAQKLQGRV
TFTTDTSTSTAYMEMRSLRSDDTAVYYCARDLYYYEGVDYWGQGTLVTVS
STSGQAGQHHHHHHGAYPYDVPDYAS [SEQ ID NO: 796]

TABLE 179
ET200-029

DNA Sequence
caggctgtgctgactcagccaccctcagtgtcagtggccccaggaaagac
ggccagggttacctgtgggggaaacaacattggaagtgaaagtgtgcact
ggtaccagcagaagccaggccaggcccctgtgttggtcatctattatgat
accgaccggccctcagggatccctgagcgattctctggctcccactctgg
gaccacggccaccctgaccatcagcagggtcgaagccggggatgaggccg
actattactgtcaggtgtgggatagtagtagggatcatgtggtattcggc
ggagggaccaagctgaccgtcctaggttctagaggtggtggtggtagcgg
cggcggcggctctggtggtggtggatccctcgagatggcccaggtgcagc
tggtgcagtctgggggaggcgtggtccagcctgggaggtccctgagactc
tcctgtgcggcctctggattcaccttcagtagctatgctatgcactgggt
ccgccaggctccaggcaagggactggagtgggtggcagttatatcatatg
atggaagcaataaatactacgcagactccgtgaagggcctattcaccatc
tccagagacaattccaagaacacgctgtatctgcaaatgaacagcctgag
agctgaggacacggccgtgtattactgtgcgcgctcttacttcacttctg
gtttctacgattactggggtcaaggtactctggtgaccgtctcctcaact
agtggccaggccggccagcaccatcaccatcaccatggcgcatacccgta
cgacgttccggactacgcttct [SEQ ID NO: 797]
Amino Acid Sequence
QAVLTQPPSVSVAPGKTARVTCGGNNIGSESVHWYQQKPGQAPVLVIYYD
TDRPSGIPERFSGSHSGTTATLTISRVEAGDEADYYCQVWDSSRDHVVFG
GGTKLTVLGSRGGGGSGGGGSGGGGSLEMAQVQLVQSGGGVVQPGRSLRL
SCAASGFTFSSYAMHWVRQAPGKGLEWVAVISYDGSNKYYADSVKGLFTI
SRDNSKNTLYLQMNSLRAEDTAVYYCARSYFTSGFYDYWGQGTLVTVSST
SGQAGQHHHHHHGAYPYDVPDYAS [SEQ ID NO: 798]

TABLE 180
ET200-030

DNA Sequence
cagtctgtcgtgacgcagccgccctcagtgtctggggccccagggcagagggtcaccatctcctgcactgggagcagttccaa
catcggggcaggttatgatgtaaattggtatcagcagtttccaggaacagcccccaaactcctcatctatggtaacagcaatcggc
cctcaggggtccctgaccgattctctggctccaagtctggcacctcagcctccctggccatcactgggctccaggctgaggatg
aggctgattattactgccagtcctatgacagcagcctgagtggctcttatgtcttcggaactgggaccaaggtcaccgtcctaggtt
ctagaggtggtggtggtagcggcggcggcggctctggtggtggtggatccctcgagatggcccagatgcagctggtgcagtct
ggggctgaggtgaagaagcctggggcctcagtgaaggtctcctgcaaggcttccggatacaccctcactgaattatccatgcac
tgggtgcgacaggctcctggaaaagggcttgagtggatgggaggttttgatcctgaagatggtgaaacaatctacgcacagaag
ttccagggcagagtcaccatgaccgaggacacatctacagacacagcctacatggagctgagcagcctgagatctgaggaca
ctgccgtgtattactgtgcgcgcatgtcttctatgtactacgattggggtcaaggtactctggtgaccgtctcctcaactagtggcca
ggccggccagcaccatcaccatcaccatggcgcatacccgtacgacgttccggactacgcttct [SEQ ID NO: 799]
Amino Acid Sequence
QSVVTQPPSVSGAPGQRVTISCTGSSSNIGAGYDVNWYQQFPGTAPKLLIYGNSN
RPSGVPDRFSGSKSGTSASLAITGLQAEDEADYYCQSYDSSLSGSYVFGTGTKVT
VLGSRGGGGSGGGGSGGGGSLEMAQMQLVQSGAEVKKPGASVKVSCKASGYT
LTELSMHWVRQAPGKGLEWMGGFDPEDGETIYAQKFQGRVTMTEDTSTDTAY
MELSSLRSEDTAVYYCARMSSMYYDWGQGTLVTVSSTSGQAGQHHHHHHGAY
PYDVPDYAS [SEQ ID NO: 800]

TABLE 181
ET200-031

DNA Sequence
tcctatgtgctgactcagccaccctcagtgtcagtggccccaggaaagac
ggccaggattacctgtgggggaaacaacattggaagtaaaagtgtgcact
ggtaccagcagaagccaggccaggcccctgtgctggtcatctattatgat
agcgaccggccctcagggatccctgagcgattctctggctccaactctgg
gaacacggccaccctgaccatcagcagggtcgaagccggggatgaggccg
actattactgtcaggtgtgggatagtagtagtgattatgtcttcggaact
gggaccaaggtcaccgtcctaggttctagaggtggtggtggtagcggcgg
cggcggctctggtggtggtggatccctcgagatggccgaggtgcagctgg
tggagactgggggaggcttggtcaagcctggagggtccctgagactctcc
tgtgcagcctctggattcaccgtcagtgactactacatgagctggatccg
ccaggctccagggaagggcctggagtggatttcatacattagtggtagtg
gtaatagcatatactacgcagactctgtgaagggccgattcaccatctcc
agggacaacgccaagaactcactggatctgcaaatgaccagcctgagagc
cgaggacacggccgtatattactgtgcgcgctctactaaattcgattact
ggggtcaaggtactctggtgaccgtctcctcaactagtggccaggccggc
cagcaccatcaccatcaccatggcgcatacccgtacgacgttccggacta
cgcttct [SEQ ID NO: 801]
Amino Acid Sequence
SYVLTQPPSVSVAPGKTARITCGGNNIGSKSVHWYQQKPGQAPVLVIYYD
SDRPSGIPERFSGSNSGNTATLTISRVEAGDEADYYCQVWDSSSDYVFGT
GTKVTVLGSRGGGGSGGGGSGGGGSLEMAEVQLVETGGGLVKPGGSLRLS
CAASGFTVSDYYMSWIRQAPGKGLEWISYISGSGNSIYYADSVKGRFTIS
RDNAKNSLDLQMTSLRAEDTAVYYCARSTKFDYWGQGTLVTVSSTSGQAG
QHHHHHHGAYPYDVPDYAS [SEQ ID NO: 802]

TABLE 182
ET200-032

DNA Sequence
ctgcctgtgctgactcagccaccctcagcgtctgggacccccgggcagag
ggtcaccatctcttgttctggaagcagctccaacgtcggaagttacactg
taaactggtaccggcaactcccaggaacggcccccacactcctcatctat
aataataatcagcggccctcaggggtccctgaccgattctctgactccaa
gtctggcacctcggcctccctgaccattagtgggctccagcctgaggatg
aggctgattattattgtgcagcatgggatgacaggctgggtggttatgtc
ttcggaactgggaccaaggtcaccgtcctaggttctagaggtggtggtgg
tagcggcggcggcggctctggtggtggtggatccctcgagatggccgagg
tgcagctggtgcagtctggagcagaggtgaaaaagccgggggagtctctg
aagatctcctgtaagggttctggatacagctttaccaactactggatcgg
ctgggtgcgccagatgcccgggaaaggcctggagtggatggggatcatct
atcctggtgactctgataccagatacagcccgtccttccaaggccaggtc
accatctcagccgacaagtccatcagcaccgcctacctacagtggagcag
cctgaaggcctcggacaccgccatgtattactgtgcgcgctctactggtt
cttctcatatgtctgatgaatggggtcaaggtactctggtgaccgtctcc
tcaactagtggccaggccggccagcaccatcaccatcaccatggcgcata
cccgtacgacgttccggactacgcttct [SEQ ID NO: 803]
Amino Acid Sequence
LPVLTQPPSASGTPGQRVTISCSGSSSNVGSYTVNWYRQLPGTAPTLLIY
NNNQRPSGVPDRFSDSKSGTSASLTISGLQPEDEADYYCAAWDDRLGGYV
FGTGTKVTVLGSRGGGGSGGGGSGGGGSLEMAEVQLVQSGAEVKKPGESL
KISCKGSGYSFTNYWIGWVRQMPGKGLEWMGIIYPGDSDTRYSPSFQGQV
TISADKSISTAYLQWSSLKASDTAMYYCARSTGSSHMSDEWGQGTLVTVS
STSGQAGQHHHHHHGAYPYDVPDYAS [SEQ ID NO: 804]

TABLE 183
ET200-033

DNA Sequence
aattttatgctgactcagccccactctgtgtcggagtctccggggaagac
ggtaaccatctcctgcaccggcagcagtggcagcattgccagcaactatg
tgcagtggtaccagcagcgcccgggcagtgcccccaccactgtgatctat
gaggataaccaaagaccctctggggtccctgatcggttctctggctccat
cgacagctcctccaactctgcctccctcaccatctctggactgaagactg
aggacgaggctgactactactgtcagtcttatgatagcagcaatcattgg
gtgttcggcggagggaccaagctgaccgtcctaggttctagaggtggtgg
tggtagcggcggcggcggctctggtggtggtggatccctcgagatggccc
aagtgcagctacagcagtggggcgcaggactgttgaagccttcggagacc
ctgtccctcacctgcgctgtctatggtgggtccttcagtggttactactg
gagctggatccgccagcccccagggaaggggctggagtggattggggaga
tcactcatagtggaaggtccaactacaacccgtccctcaagagtcgagtc
accatatcagtagacacgtccaagaaccagttctccctgaagctgagctc
tgtgaccgccgcggacacggccgtgtattactgtgcgcgctcttctatca
tgtctgattactggggtcaaggtactctggtgaccgtctcctcaactagt
ggccaggccggccagcaccatcaccatcaccatggcgcatacccgtacga
cgttccggactacgcttct [SEQ ID NO: 805]
Amino Acid Sequence
NFMLTQPHSVSESPGKTVTISCTGSSGSIASNYVQWYQQRPGSAPTTVIY
EDNQRPSGVPDRFSGSIDSSSNSASLTISGLKTEDEADYYCQSYDSSNHW
VFGGGTKLTVLGSRGGGGSGGGGSGGGGSLEMAQVQLQQWGAGLLKPSET
LSLTCAVYGGSFSGYYWSWIRQPPGKGLEWIGEITHSGRSNYNPSLKSRV
TISVDTSKNQFSLKLSSVTAADTAVYYCARSSIMSDYWGQGTLVTVSSTS
GQAGQHHHHHHGAYPYDVPDYAS [SEQ ID NO: 806]

TABLE 184
ET200-034

DNA Sequence
cagtctgtgttgacgcagccgccctcagtgtctggggccccagggcagag
ggtcaccatctcctgcactgggagcacctccaacatcggggcaggttatg
atgtacactggtaccagcagcttccaggaacagcccccaaactcctcatc
aacaataacaggaatcggccctcaggggtccctgaccgattctctggctc
caagtctggcacgtcagccaccctgggcatcaccggactccagactgggg
acgaggccgattattactgcggaacatgggatggcagcctgactggtgca
gtgttcggcggagggaccaagctgaccgtcctaggttctagaggtggtgg
tggtagcggcggcggcggctctggtggtggtggatccctcgagatggccg
aggtccagctggtgcagtctggggctgaggtgaagaagcctgggtcctcg
tggaaggtctcatgcaaggcttctggaggcaccttcagcagctatgctat
cagctgggtgcgacaggcccctggacaagggcttgagtggatgggaggga
tcatccctatctttggtacagcaaactacgcacagaagttccagggcaga
gtcacgattaccgcggacgaatccacgagcacagcctacatggagctgag
cagcctgagatctgaggacacggccgtgtattactgtgcgcgcggttctg
ctctggaccattacgatcgttggggtcaaggtactctggtgaccgtctcc
tcaactagtggccaggccggccagcaccatcaccatcaccatggcgcata
cccgtacgacgttccggactacgcttct [SEQ ID NO: 807]
Amino Acid Sequence
QSVLTQPPSVSGAPGQRVTISCTGSTSNIGAGYDVHWYQQLPGTAPKLLI
NNNRNRPSGVPDRFSGSKSGTSATLGITGLQTGDEADYYCGTWDGSLTGA
VFGGGTKLTVLGSRGGGGSGGGGSGGGGSLEMAEVQLVQSGAEVKKPGSS
VKVSCKASGGTFSSYAISWVRQAPGQGLEWMGGIIPIFGTANYAQKFQGR
VTITADESTSTAYMELSSLRSEDTAVYYCARGSALDHYDRWGQGTLVTVS
STSGQAGQHHHHHHGAYPYDVPDYAS [SEQ ID NO: 808]

TABLE 185
ET200-035

DNA Sequence
aattttatgctgactcagccccactctgtgtcggagtctccggggaagac
ggtaaccatctcctgcacccgcagcagtggcagcattgccagcaactatg
tgcagtggtaccagcagcgcccgggcagtgcccccaccactgtgatctat
gaggataaccaaagaccctctggggtccctgatcggttctctggctccat
cgacagctcctccaactctgcctccctcaccatctctggactgaagactg
aggacgaggctgactactactgtcagtcttatgatagcaccaattgggtg
ttcggcggagggaccaagctgaccgtcctaggttctagaggtggtggtgg
tagcggcggcggcggctctggtggtggtggatccctcgagatggcccagg
tgcagctggtgcagtctggggctgaggtgaagaagcctgggtcctcggtg
aaggtctcctgcaaggcttctggaggcaccttcagcagctatgctatcag
ctgggtgcgacaggcccctggacaagggcttgagtggatgggagggatca
tccctatctttggtacagcaaactacgcacagaagttccagggcagagtc
acgattaccgcggacgaatccacgagcacagcctacatggagctgagcag
cctgagatctgaggacactgccgtgtattactgtgcgcgctacaactact
acttcaacgattactggggtcaaggtactctggtgaccgtctcctcaact
agtggccaggccggccagcaccatcaccatcaccatggcgcatacccgta
cgacgttccggactacgcttct [SEQ ID NO: 809]
Amino Acid Sequence
NFMLTQPHSVSESPGKTVTISCTRSSGSIASNYVQWYQQRPGSAPTTVIY
EDNQRPSGVPDRFSGSIDSSSNSASLTISGLKTEDEADYYCQSYDSTNWV
FGGGTKLTVLGSRGGGGSGGGGSGGGGSLEMAQVQLVQSGAEVKKPGSSV
KVSCKASGGTFSSYAISWVRQAPGQGLEWMGGIIPIFGTANYAQKFQGRV
TITADESTSTAYMELSSLRSEDTAVYYCARYNYYFNDYWGQGTLVTVSST
SGQAGQHHHHHHGAYPYDVPDYAS [SEQ ID NO: 810]

TABLE 186
ET200-037

DNA Sequence
tcctatgtgctgactcagccaccctcagtgtcagtggccccaggaaagac
ggccaggattacctgtgggggaaacaacattggaagtaaaagtgtgcact
ggtaccagcagaagccaggccaggcccctgtgctggtcatctattatgat
agcgaccggccctcagggatccctgagcgattctctggctccaactctgg
gaacacggccaccctgaccatcagcagggtcgaagccggggatgaggccg
actattactgtcaggtgtgggatagtagtagtgatcatccttatgtcttc
ggaactgggaccaaggtcaccgtcctaggttctagaggtggtggtggtag
cggcggcggcggctctggtggtggtggatccctcgagatggcccagatgc
agctggtgcagtctggagctgaggtgaagaagcctggggcctcagtgaag
gtctcctgcaaggcttctggttacacctttaccagctatggtatcagctg
ggtgcgacaggcccctggacaagggcttgagtggatgggatggatcagcg
cttacaatggtaacacaaactatgcacagaagctccagggcagagtcacc
atgaccacagacacatccacgagcacagcctacatggagctgaggagcct
gagatctgacgacactgccgtgtattactgtgcgcgctctatgttcggtg
ctcatgattcttggggtcaaggtactctggtgaccgtctcctcaactagt
ggccaggccggccagcaccatcaccatcaccatggcgcatacccgtacga
cgttccggactacgcttct [SEQ ID NO: 811]
Amino Acid Sequence
SYVLTQPPSVSVAPGKTARITCGGNNIGSKSVHWYQQKPGQAPVLVIYYD
SDRPSGIPERFSGSNSGNTATLTISRVEAGDEADYYCQVWDSSSDHPYVF
GTGTKVTVLGSRGGGGSGGGGSGGGGSLEMAQMQLVQSGAEVKKPGASVK
VSCKASGYTFTSYGISWVRQAPGQGLEWMGWISAYNGNTNYAQKLQGRVT
MTTDTSTSTAYMELRSLRSDDTAVYYCARSMFGAHDSWGQGTLVTVSSTS
GQAGQHHHHHHGAYPYDVPDYAS [SEQ ID NO: 812]

TABLE 187
ET200-038

DNA Sequence
cagtctgtgttgacgcagccgccctcagtgtctggggccccagggcagag
ggtcaccatctcctgcactgggagcagctccaacatcggggcaggttttg
atgtacactggtaccagctacttccaggaacagcccccaaactcctcatc
tatgctaacagcaatcggccctcaggggtccctgaccgattctctggctc
caagtctggcacctcagcctccctggccatcactgggctcctggctgagg
atgaggctgattattactgccagtcctatgacagcagcctgagtggtgtg
gtattcggcggagggaccaagctgaccgtcctaggttctagaggtggtgg
tggtagcggcggcggcggctctggtggtggtggatccctcgagatggccc
aggtgcagctggtgcaatctggggctgaggtgaagaagcctgggtcctcg
gtgaaggtctcctgcaaggcttctggaggcaccttcagcagctatgctat
cagctgggtgcgacaggcccctggacaagggcttgagtggatgggaggga
tcatccctatctttggtacagcaaactacgcacagaagttccagggcaga
gtcacgattaccgcggacgaatccacgagcacagcctacatggagctgag
cagcctgagatctgaggacactgccgtgtattactgtgcgcgcggtgctt
ctttcgaccgtcatgataactggggtcaaggtactctggtgaccgtctcc
tcaactagtggccaggccggccagcaccatcaccatcaccatggcgcata
cccgtacgacgttccggactacgcttct [SEQ ID NO: 813]
Amino Acid Sequence
QSVLTQPPSVSGAPGQRVTISCTGSSSNIGAGFDVHWYQLLPGTAPKLLI
YANSNRPSGVPDRFSGSKSGTSASLAITGLLAEDEADYYCQSYDSSLSGV
VFGGGTKLTVLGSRGGGGSGGGGSGGGGSLEMAQVQLVQSGAEVKKPGSS
VKVSCKASGGTFSSYAISWVRQAPGQGLEWMGGIIPIFGTANYAQKFQGR
VTITADESTSTAYMELSSLRSEDTAVYYCARGASFDRHDNWGQGTLVTVS
STSGQAGQHHHHHHGAYPYDVPDYAS [SEQ ID NO: 814]

TABLE 188
ET200-039

DNA Sequence
aattttatgctgactcagccccactctgtgtcggagtctccggggaagac
ggtaaccatctcctgcacccgcagcagtggcagcattgccagcaactatg
tgcagtggtaccagcagcgcccgggcagttcccccaccactgtgatctat
gaggataaccaaagaccctctggggtccctgatcggttctctggctccat
cgacagctcctccaactctgcctccctcaccatctctggactgaagactg
aggacgaggctgactactactgtcagtcttatgatagcagcaattgggtg
ttcggcggagggaccaagctgaccgtcctaggttctagagtggtggtggt
agcggcggcggcggctctggtggtggtggatccctcgagatggccgaggt
ccagctggtgcagtctggggctgaggtgaagaagcctgggtcctcggtga
aggtctcctgcaaggcttctggaggcaccttcagcagctatgctatcagc
tgggtgcgacaggcccctggacaagggcttgagtggatgggagggatcat
ccctatctttggtacagcaaactacgcacagaagttccagggcagagtca
cgattaccgcggacgaatccacgagcacagcctacatggagctgagcagc
ctgagatctgaggacacggccgtgtattactgtgcgcgctctaactacta
ctacaacgattactggggtcaaggtactctggtgaccgtctcctcaacta
gtggccaggccggccagcaccatcaccatcaccatggcgcatacccgtac
gacgttccggactacgcttct [SEQ ID NO: 815]
Amino Acid Sequence
NFMLTQPHSVSESPGKTVTISCTRSSGSIASNYVQWYQQRPGSSPTTVIY
EDNQRPSGVPDRFSGSIDSSSNSASLTISGLKTEDEADYYCQSYDSSNWV
FGGGTKLTVLGSRGGGGSGGGGSGGGGSLEMAEVQLVQSGAEVKKPGSSV
KVSCKASGGTFSSYAISWVRQAPGQGLEWMGGIIPIFGTANYAQKFQGRV
TITADESTSTAYMELSSLRSEDTAVYYCARSNYYYNDYWGQGTLVTVSST
SGQAGQHHHHHHGAYPYDVPDYAS [SEQ ID NO: 816]

TABLE 189
ET200-040

DNA Sequence
cagtctgtgttgacgcagccgccctcagtgtctggggccccagggcagag
ggtcaccatctcctgcactgggagcagctccaacatcggggcaggttatg
atgtacactggtaccagcagcttccaggaacagcccccaaactcctcatc
tatggtaacagcaatcggccctcaggggtccctgaccgattctctggctc
caagtctggcacctcagcctccctggccatcactgggctccaggctgagg
atgaggctgattattactgccagtcctatgacagcagcctgagtggttat
gtcttcggaactgggaccaaggtcaccgtcctaggttctagaggtggtgg
tggtagcggcggcggcggctctggtggtggtggatccctcgagatggccc
aggtgcagctggtgcagtctggggctgaggtgaagaagcctggggcctca
gtgaaggtctcctgcaaggtttccggatacaccctcactgaattatccat
gcactgggtgcgacaggctcctggaaaagggcttgagtggatgggaggtt
ttgatcctgaagatggtgaaacaatctacgcacagaagttccagggcaga
gtcaccatgaccgaggacacatctacagacacagcctacatggagctgag
cagcctgagatctgaggacactgccgtgtattactgtgcgcgctactctg
gtgtttactacgattggggtcaaggtactctggtgaccgtctcctcaact
agtggccaggccggccagcaccatcaccatcaccatggcgcatacccgta
cgacgttccggactacgcttct [SEQ ID NO: 817]
Amino Acid Sequence
QSVLTQPPSVSGAPGQRVTISCTGSSSNIGAGYDVHWYQQLPGTAPKLLI
YGNSNRPSGVPDRFSGSKSGTSASLAITGLQAEDEADYYCQSYDSSLSGY
VFGTGTKVTVLGSRGGGGSGGGGSGGGGSLEMAQVQLVQSGAEVKKPGAS
VKVSCKVSGYTLTELSMHWVRQAPGKGLEWMGGFDPEDGETIYAQKFQGR
VTMTEDTSTDTAYMELSSLRSEDTAVYYCARYSGVYYDWGQGTLVTVSST
SGQAGQHHHHHHGAYPYDVPDYAS [SEQ ID NO: 818]

TABLE 190
ET200-041

DNA Sequence
aattttatgctgactcagccccactctgtgtcggggtctccggggaagac
ggtaaccatctcctgcaccggcagcagtggcagcattgccgacaactttg
tgcagtggtaccagcagcgcccgggcggtgtccccaccactgtgatcttt
aatgatgacgaaagaccctctggcgtccctgatcggttctctggctccat
cgacacctcctccaattctgcctccctcaccatctctggactgaagactg
aggacgggctgactactactgtcagtcttatgataataataatcgagggg
tgttcggcggagggaccaagctgaccgtcctaggttctagaggtggtggt
ggtagcggcggcggcggctctggtggtggtggatccctcgagatggccca
ggtccagctggtgcagtctggggctgaggtgaagaagcctgggtcctcgg
tgaaggtctcctgcaaggcttctggaggcaccttcagcagctatgctatc
agctgggtgcgacaggcccctggacaagggcttgagtggatgggatggat
gaaccctaacagtggtaacacaggctatgcacagaagttccagggcagag
tcaccatgaccaggaacacctccataagcacagcctacatggagctgagc
aacctgagatctgaggacacggccgtgtattactgtgcgcgctactactc
ttacggttacgattggggtcaaggtactctggtgaccgtctcctcaacta
gtggccaggccggccagcaccatcaccatcaccatggcgcatacccgtac
gacgttccggactacgcttct [SEQ ID NO: 819]
Amino Acid Sequence
NFMLTQPHSVSGSPGKTVTISCTGSSGSIADNFVQWYQQRPGGVPTTVIF
NDDERPSGVPDRFSGSIDTSSNSASLTISGLKTEDEADYYCQSYDNNNRG
VFGGGTKLTVLGSRGGGGSGGGGSGGGGSLEMAQVQLVQSGAEVKKPGSS
VKVSCKASGGTFSSYAISWVRQAPGQGLEWMGWMNPNSGNTGYAQKFQGR
VTMTRNTSISTAYMELSNLRSEDTAVYYCARYYSYGYDWGQGTLVTVSST
SGQAGQHHHHHHGAYPYDVPDYAS [SEQ ID NO: 820]

TABLE 191
ET200-042

DNA Sequence
cagtctgtcgtgacgcagccgccctcagtgtctggggccccagggcagac
ggtcaccatctcctgcactgggggcagctccaacatcgggacaggttatt
ttgtaaattggtaccagcaggttccaggaaaagcccccaaactcctcatc
ctgggtaacaataatcggccctcgggggtccctgaccgactctccggctc
cacgtccggcacctcagcctccctggccatcactgggctccaggctgagg
atgagggtacttattactgccagtcctatgacagcagcctgagtggttat
gtcttcggaactgggaccaaggtcaccgtcctaggttctagaggtggtgg
tggtagcggcggcggcggctctggtggtggtggatccctcgagatggccc
aggtacagctgcagcagtcaggtccaggactggtgaagccctcgcagacc
ctctcactcacctgtggcatctccggggacagtgtctctaccaacagtgt
tgcttggcactggatcaggcagtccccatcgagaggccttgagtggctgg
gaaggacatactacaggtccaagtggtctaatgactatggagtatctgtg
aaaagtcgaatcaccatcatcccagacacatccaagaaccagttctccct
gcagctgaactctgtgactcccgaggacacggctgtgtattactgtgcgc
gctcttcttcttggtaccagatcttcgattactggggtcaaggtactctg
gtgaccgtctcctcaactagtggccaggccggccagcaccatcaccatca
ccatggcgcatacccgtacgacgttccggactacgcttct
[SEQ ID NO: 821]
Amino Acid Sequence
QSVVTQPPSVSGAPGQTVTISCTGGSSNIGTGYFVNWYQQVPGKAPKLLI
LGNNNRPSGVPDRLSGSTSGTSASLAITGLQAEDEGTYYCQSYDSSLSGY
VFGTGTKVTVLGSRGGGGSGGGGSGGGGSLEMAQVQLQQSGPGLVKPSQT
LSLTCGISGDSVSTNSVAWHWIRQSPSRGLEWLGRTYYRSKWSNDYGVSV
KSRITIIPDTSKNQFSLQLNSVTPEDTAVYYCARSSSWYQIFDYWGQGTL
VTVSSTSGQAGQHHHHHHGAYPYDVPDYAS [SEQ ID NO: 822]

TABLE 192
ET200-043

DNA Sequence
aattttatgctgactcagccccactctgtgtcggagtctccggggaagac
ggtaaccatctcctgcaccggcagcagcgacagcatagccaacaactatg
ttcagtggtaccagcagcgcccgggcagtgcccccaccaatgtgatctac
gaagatgtccaaagaccctctggggtccctgatcggttctctgggtccat
cgacagctcctccaactctgcctccctcaccatctctggactgaagactg
aggacgaggctgtctactattgtcagtcttatcatagcgacaatcgttgg
gtgttcggcggcgggaccaagctgaccgtcctaggttctagaggtggtgg
tggtagcggcggcggcggctctggtggtggtggatccctcgagatggccc
aggtgcagctggtggagtctgggggaggcttggtacagcctggggggtcc
ctgagactctcctgtgcagcctctggattcacctttagcagctatgccat
gagctgggtccgccaggctccagggaaggggctggagtgggtctcagcta
ttagtggtagtggtggtagcacatactacgcagactccgtgaagggccgg
ttcaccatctccagagacaattccaagaacacgctgtatctgcaaatgaa
cagcctgagagccgaggacacggccgtatattactgtgcgcgctctggtg
cttactgggactactctgtttacgatgaatggggtcaaggtactctggtg
accgtctcctcaactagtggccaggccggccagcaccatcaccatcacca
tggcgcatacccgtacgacgttccggactacgcttct
[SEQ ID NO: 823]
Amino Acid Sequence
NFMLTQPHSVSESPGKTVTISCTGSSDSIANNYVQWYQQRPGSAPTNVIY
EDVQRPSGVPDRFSGSIDSSSNSASLTISGLKTEDEAVYYCQSYHSDNRW
VFGGGTKLTVLGSRGGGGSGGGGSGGGGSLEMAQVQLVESGGGLVQPGGS
LRLSCAASGFTFSSYAMSWVRQAPGKGLEWVSAISGSGGSTYYADSVKGR
FTISRDNSKNTLYLQMNSLRAEDTAVYYCARSGAYWDYSVYDEWGQGTLV
TVSSTSGQAGQHHHHHHGAYPYDVPDYAS [SEQ ID NO: 824]

TABLE 193
ET200-044

DNA Sequence
cagtctgtgttgactcagccaccctcagtgtccgtgtccccaggacagac
agccaccatcgcctgttctggacataaattgggggataaatatgcttcct
ggtatcagcagaagtcgggccagtcccctgtgttgatcatctatcaggat
aataagcggccctcagggattcctgagcgattctctggctccaactctgg
gaacacagccactctgaccatcagcgggacccaggctctggatgaggctg
actattattgtcaggcgtgggacagtagtacttatgtggcattcggcgga
gggaccaagctgaccgtcctaggttctagaggtggtggtggtagcggcgg
cggcggctctggtggtggtggatccctcgagatggcccaggtgcagctgc
aggagtccggcccaggactggtgaagccttcggagaccctgtccctcacc
tgcgttgtctctggtggctccatcagcagtagtaactggtggagctgggt
ccgccagcccccagggaaggggctggagtggattggggaaatctatcata
gtgggagccccaactacaacccatccctcaagagtcgagtcaccatatca
gtagacaagtccaagaaccagttctccctgaagctgagctctgtgaccgc
cgcggacacggccgtgtattactgtgcgcgcatgactactcatactttcg
gttacgatgcttggggtcaaggtactctggtgaccgtctcctcaactagt
ggccaggccggccagcaccatcaccatcaccatggcgcatacccgtacga
cgttccggactacgcttct [SEQ ID NO: 825]
Amino Acid Sequence
QSVLTQPPSVSVSPGQTATIACSGHKLGDKYASWYQQKSGQSPVLIIYQD
NKRPSGIPERFSGSNSGNTATLTISGTQALDEADYYCQAWDSSTYVAFGG
GTKLTVLGSRGGGGSGGGGSGGGGSLEMAQVQLQESGPGLVKPSETLSLT
CVVSGGSISSSNWWSWVRQPPGKGLEWIGEIYHSGSPNYNPSLKSRVTIS
VDKSKNQFSLKLSSVTAADTAVYYCARMTTHTFGYDAWGQGTLVTVSSTS
GQAGQHHHHHHGAYPYDVPDYAS [SEQ ID NO: 826]

TABLE 194
ET200-045

DNA Sequence
cagcctgtgctgactcagccaccctcagtgtcagtggccccaggaaagac
ggccacgattacttgtgggggaaacaacattggaagtgaaagtgtgcact
ggtaccaccagaagccaggccaggcccctgtgttggtcatctatgatgat
gccggccggccctcagggatccctgagcgattcactggctccaactctgg
gaacacggccaccctgaccatcagcagggtcgaagccggggatgaggcga
ctattactgtcaggtgtgggacagaaatagctgctcagtttgtcttcgga
cctgggaccaaggtcaccgtcctaggttctagaggtggtggtggtagcgg
cggcggcggctctggtggtggtggatccctcgagatggccgaggtccagc
tggtgcagtctggagctgaggtgaagaagcctggggcctcagtgaaggtc
tcctgcaaggcttctggttacacctttaccagctatggtatcagctgggt
gcgacaggcccctggacaagggcttgagtggatgggatggatcagcgctt
acaatggtaacacaaactatgcacagaagctccagggcagagtcaccatg
accacagacacatccacgagcacagcctacatggagctgaggagcctgag
atctgacgacacggccgtgtattactgtgcgcgcggtgttcatctggatt
ggtggggtcaaggtactctggtgaccgtctcctcaactagtggccaggcc
ggccagcaccatcaccatcaccatggcgcatacccgtacgacgttccgga
ctacgcttct [SEQ ID NO: 827]
Amino Acid Sequence
QPVLTQPPSVSVAPGKTATITCGGNNIGSESVHWYHQKPGQAPVLVIYDD
AGRPSGIPERFTGSNSGNTATLTISRVEAGDEADYYCQVWDRNSAQFVFG
PGTKVTVLGSRGGGGSGGGGSGGGGSLEMAEVQLVQSGAEVKKPGASVKV
SCKASGYTFTSYGISWVRQAPGQGLEWMGWISAYNGNTNYAQKLQGRVTM
TTDTSTSTAYMELRSLRSDDTAVYYCARGVHLDWWGQGTLVTVSSTSGQA
GQHHHHHHGAYPYDVPDYAS [SEQ ID NO: 828]

TABLE 195
ET200-069

DNA Sequence
cagtctgtcgtgacgcagccaccctcagcgtctgggacccccgggcagag
ggtcaccatctcttgttctggaagcagctccaacatcggaagtaattatg
tatactggtaccagcagctcccaggaacggcccccaaactcctcatctat
agtaataatcagcggccctcaggggtccctgaccgattctctggctccaa
gtctggcacctcagcctccctggccatcagtgggctccggtccgaggatg
aggctgattattactgtgcagcatgggatgacagcctgagtggttatgtc
ttcggaactgggaccaagctgaccgtcctaggttctagaggtggtggtgg
tagcggcggcggcggctctggtggtggtggatccctcgagatggcccagg
tgcagctacagcagtggggcgcaggactgttgaagccttcggagaccctg
tccctcacctgcgctgtctatggtgggtccttcagtggttactactggag
ctggatccgccagcccccagggaaggggctggagtggattggggaaatca
atcatagtggaagcaccaactacaacccgtccctcaagagtcgagtcacc
atatcagtagacacgtccaagaaccagttctccctgaagctgagctctgt
gaccgccgcggacacggccgtgtattactgtgcgcgcctgtacgaaggtg
gttaccatggttggggttcttggctgtcttctgattcttggggtcaaggt
actctggtgacccgtctcctcaactagtggccaggccggccagcaccatc
accatcaccatggcgcatacccgtacgacgttccggactacgcttct
[SEQ ID NO: 829]
Amino Acid Sequence
QSVVTQPPSASGTPGQRVTISCSGSSSNIGSNYVYWYQQLPGTAPKLLIY
SNNQRPSGVPDRFSGSKSGTSASLAISGLRSEDEADYYCAAWDDSLSGYV
FGTGTKLTVLGSRGGGGSGGGGSGGGGSLEMAQVQLQQWGAGLLKPSETL
SLTCAVYGGSFSGYYWSWIRQPPGKGLEWIGEINHSGSTNYNPSLKSRVT
ISVDTSKNQFSLKLSSVTAADTAVYYCARLYEGGYHGWGSWLSSDSWGQG
TLVTVSSTSGQAGQHHHHHHGAYPYDVPDYAS [SEQ ID NO: 830]

TABLE 196
ET200-078

DNA Sequence
cagtctgtgttgactcagccaccctcagcgtctgggacccccgggcagag
ggtcaccatctcttgttctggaagcagctccaacatcggaagtaatactg
taaactggtaccagcagctcccaggaacggcccccaaactcctcatctat
agtaataatcagcggccctcggggtccctgaccgattctcatggctccaa
gtctggcacctcagcctccctggccatcagtgggctccagtctgaggatg
aggctattattactgtgcagcatgggatgacagcctggaatggttattgg
gtgttcggcggagggaccaagctgaccgtcctaggttctagaggtggtgg
tggtagcggcggcggcggctctggtggtggtggatccctcgagatggccc
aggtgcagctacagcagtggggcgcaggactgttgaagccttcggagacc
ctgtccctcacctgcgctgtctatggtgggtccttcagtggttactactg
gagctggatccgccagcccccagggaaggggctggagtggattggggaaa
tcaatcatagtggaagcaccaactacaacccgtccctcaagagtcgagtc
accatatcagtagacacgtccaagaaccagttctccctgaagctgagctc
tgtgaccgccgcggacacggctgtgtattactgtgcgcgcgaaggggcat
ttgatgcttttgatatctggggccaagggacaatggtcaccgtctcttca
actagtggccaggccggccagcaccatcaccatcaccatggcgcataccc
gtacgacgttccggactacgcttct [SEQ ID NO: 831]
Amino Acid Sequence
QSVLTQPPSASGTPGQRVTISCSGSSSNIGSNTVNWYQQLPGTAPKLLIY
SNNQRPSGVPDRFSGSKSGTSASLAISGLQSEDEADYYCAAWDDSLNGYW
VFGGGTKLTVLGSRGGGGSGGGGSGGGGSLEMAQVQLQQWGAGLLKPSET
LSLTCAVYGGSFSGYYWSWIRQPPGKGLEWIGEINHSGSTNYNPSLKSRV
TISVDTSKNQFSLKLSSVTAADTAVYYCAREGAFDAFDIWGQGTMVTVSS
TSGQAGQHHHHHHGAYPYDVPDYAS [SEQ ID NO: 832]

TABLE 197
ET200-079

DNA Sequence
tcctatgagctgactcagccaccctcagcgtctgggacccccgggcagag
ggtcaccatctcttgttctggaagcagctccaacatcggaagtaattatg
tatactggtaccagcagctcccaggaacggcccccaaactcttcatctat
aggaataatcagcggccctcaggggtccctgaccgattctctggctccaa
gtctggcacctcagcctccctggccatcagtgggctccggtccgaggatg
aggctgattattactgtgcagcatgggatgacagcctgagtggttatctc
ttcggaactgggaccaaggtcaccgtcctaggttctagaggtggtggtgg
tagcggcggcggcggctctggtggtggtggatccctcgagatggccgagg
tgcagctggtggagtctgggggaggcttggtacagcctggcaggtccctg
agactctcctgtgcagcctctggattcacctttgatgattatgccatgca
ctgggtccggcaagctccagggaagggcctggagtgggtctcaggtatta
gttggaatagtggtagcataggctatgcggactctgtgaagggccgattc
accatctccagagacaacgccaagaactccctgtatctgcaaatgaacag
tctgagagctgaggacacggccttgtattactgtgcaaatggcgactcca
actactactacggtatggacgtctggggccaagggaccacggtcaccgtc
tcctcaactagtggccaggccggccagcaccatcaccatcaccatggcgc
atacccgtacgacgttccggactacgcttct [SEQ ID NO: 833]
Amino Acid Sequence
SYELTQPPSASGTPGQRVTISCSGSSSNIGSNYVYWYQQLPGTAPKLFIY
RNNQRPSGVPDRFSGSKSGTSASLAISGLRSEDEADYYCAAWDDSLSGYL
FGTGTKVTVLGSRGGGGSGGGGSGGGGSLEMAEVQLVESGGGLVQPGRSL
RLSCAASGFTFDDYAMHWVRQAPGKGLEWVSGISWNSGSIGYADSVKGRF
TISRDNAKNSLYLQMNSLRAEDTALYYCANGDSNYYYGMDVWGQGTTVTV
SSTSGQAGQHHHHHHGAYPYDVPDYAS [SEQ ID NO: 834]

TABLE 198
ET200-081

DNA Sequence
cagtctgccctgactcagcctgcctccgtgtccgggtctcctggacagtc
gatcaccatctcctgcactggaaccagcagtgacattggtggttataact
atgtctcctggtaccaacaacacccaggcaaagcccccaaactcatgatt
tatgatgtcagtaatcggccctcaggggtttctaatcgcttctctggctc
caagtctggcaacacggcctccctgaccatctctgggctccaggctgagg
acgaggctgattattactgcatctcatatacacgcacctggaacccctat
gtcttcgggagtgggaccaaggtcaccgtcctaggttctagaggtggtgg
tggtagcggcggcggcggctctggtggtggtggatccctcgagatggccg
aggtgcagctggtgcagtctgggggaggcgtggtacagcctggggggtcc
ctgagactctcctgtgcagcctctggattcacctttgatgattatgccat
gcactgggtcctcaagctccagggaagggtctggagtgggtctctcttat
tagtggggatggtggtagcacatacgtatgcagactctgtgaagggccga
ttcaccatctccagagacaacagcaaaaactccctgtatctgcaaatgaa
cagtctgagaactgaggacaccgccttgtattactgtgcaaaagatcggg
cagcagctggctactactactacggtatggacgtctggggccaagggacc
acggtcaccgtctccttcaactagtggccaggccggccagcaccatcacc
atcaccatggcgcatacccgtacgacgttccggactacgcttct
[SEQ ID NO: 835]
Amino Acid Sequence
QSALTQPASVSGSPGQSITISCTGTSSDIGGYNYVSWYQQHPGKAPKLMI
YDVSNRPSGVSNRFSGSKSGNTASLTISGLQAEDEADYYCISYTRTWNPY
VFGSGTKVTVLGSRGGGGSGGGGSGGGGSLEMAEVQLVQSGGGVVQPGGS
LRLSCAASGFTFDDYAMHWVRQAPGKGLEWVSLISGDGGSTYYADSVKGR
FTISRDNSKNSLYLQMNSLRTEDTALYYCAKDRAAAGYYYYGMDVWGQGT
TVTVSSTSGQAGQHHHHHHGAYPYDVPDYAS [SEQ ID NO: 836]

TABLE 199
ET200-097

DNA Sequence
ctgcctgtgctgactcagccaccctcagtgtccgtgtccccaggacagac
agccatcatcacctgctctggagataaattgggggaaaaatatgtttcct
ggtatcagcagaagccaggccagtcccctgtactggtcatcgatcaagat
accaggaggccctcagggatccctgagcgattctctggctccaactctgg
gaccacagccactctgaccatcagcgggacccaggctatggatgaggctg
actattactgtcaggcgtgggacaggggtgtggtattcggcggagggacc
aagctgaccgtcctaggttctagaggtggtggtggtagcggcggcggcgg
ctctggtggtggtggatccctcgagatggccgaggtgcagctggtggagt
ctgggggagacttggtacagcctggcaggtccctgagactctcctgtgca
gcctctggattcacctttaatgattatgccatgcactgggtccggcaagc
tccagggaagggcctggagtgggtctcaggtattagttggagtggtaata
acataggctatgcggactctgtgaagggccgattcaccatctccagagac
aacgccaagaactccctgtatctgcaaatgaacagtctgagagctgagga
cacggccttgtattactgtgcaaaagatagtatacggtatggcatcacct
ggggaggttttgactactggggccagggaaccctggtcaccgtctcctca
actagtggccaggccggccagcaccatcaccatcaccatggcgcataccc
gtacgacgttccggactacgcttct [SEQ ID NO: 837]
Amino Acid Sequence
LPVLTQPPSVSVSPGQTAIITCSGDKLGEKYVSWYQQKPGQSPVLVIDQD
TRRPSGIPERFSGSNSGTTATLTISGTQAMDEADYYCQAWDRGVVFGGGT
KLTVLGSRGGGGSGGGGSGGGGSLEMAEVQLVESGGDLVQPGRSLRLSCA
ASGFTFNDYAMHWVRQAPGKGLEWVSGISWSGNNIGYADSVKGRFTISRD
NAKNSLYLQMNSLRAEDTALYYCAKDSIRYGITWGGFDYWGQGTLVTVSS
TSGQAGQHHHHHHGAYPYDVPDYAS [SEQ ID NO: 838]

TABLE 200
ET200-098

DNA Sequence
cagcctgtgctgactcagccaccctcggtgtccaagggcttgagacagaccgccacactcacctgcactgggaacagcaacaatgttggcaac
ctaggagtagcttggctgcagcagcaccagggccaccctcccaaactcctatcctacaggaataacaaccggccctcagggatctcagagagat
tatctgcatccaggtcaggaaacacagcctccctgaccattactggactccagcctgaggacgaggctgactattactgctcagcatgggacagt
agcctcagtgcttgggtgttcggcggagggaccaagctgaccgtcctaggttctagaggtggtggtggtagcggcggcggcggctctggtggt
ggtggatccctcgagatggccgaggtgcagctggtggagtctgggggagtcgtggtacagcctggggggtccctgagactctcctgtgcagcc
tctggattcacctttgatgattatgccatgcactgggtccgtcaagctccggggaagggtctggagtgggtctctcttattaattgggatggtggtag
cacctactatgcagactctgtgaagggtcgattcaccatctccagagacaacagcaaaaactccctgtatctgcaaatgaacagtctgagagctga
ggacaccgccttgtattactgtgcaaaagggatgggcctgagggcgtttgactactggggccagggaaccctggtcaccgtctcctcaactagtg
gccaggccggccagcaccatcaccatcaccatggcgcatacccgtacgacgttccggactacgcttct [SEQ ID NO: 839]
Amino Acid Sequence
QPVLTQPPSVSKGLRQTATLTCTGNSNNVGNLGVAWLQQHQGHPPKLLSYRNNNRPSGISE
RLSASRSGNTASLTITGLQPEDEADYYCSAWDSSLSAWVFGGGTKLTVLGSRGGGGSGGGG
SGGGGSLEMAEVQLVESGGVVVQPGGSLRLSCAASGFTFDDYAMHWVRQAPGKGLEWVS
LINWDGGSTYYADSVKGRFTISRDNSKNSLYLQMNSLRAEDTALYYCAKGMGLRAFDYW
GQGTLVTVSSTSGQAGQHHHHHHGAYPYDVPDYAS [SEQ ID NO: 840]

TABLE 201
ET200-099

DNA Sequence
cagtctgtgttgactcagccaccctcagcgtctgggacccccgggcagagggtcaccatctcctgttctggaagcagctcggaagtaa
tactgtaaactggtaccagcagctcccaggaacggcccccaaatcctcatctatagtaatgatcagcggccctcaggggtccctgaccgattctc
tggctccaagtccggcacctcagcctccctggccatcagtgggctccagtctgaggatgaggctgattattacttgtgcttcatgggatgacagcct
gaatggcgttatgtcttcggaactgggaccaaggtcaccgtcctaggttctagaggtggtggtggtagcggcggcggcggctctggtggtggtggt
ggatccctcgagatggcccaggtccagctggtacagtctggggctgaggtgaggaagcctggggcctcagtgaaggtttcctgaagacttctg
gatacaccttcagttggtatgctatacattgggtgcgccaggcccccggacaaaggcttgagtggatggatggatcaacgctggcaatggaa
cacaaaatattcacagaaatttcagggcagagtcagtcttaccagggacacatccgcgagcacagcctacatggagctgagcagcctgagatct
gatgacacggctgtgtattactgtgcgagacccgataattatggttcgggtggggatgtttttgatatctggggccaagggacaatggtcaccgtct
cttcaactagtggccaggccggccagcaccatcaccatcaccatcaccatggcgcatacccgtacgacgttccggactacgcttct [SEQ ID NO:
841]
Amino Acid Sequence
QSVLTQPPSASGTPGQRVTISCSGSSSNIGSNTVNWYQQLPGTAPKLLIYSNDQRPSGVPDRF
SGSKSGTSASLAISGLQSEDEADYYCASWDDSLNGRYVFGTGTKVTVLGSRGGGGSGGGGS
GGGGSLEMAQVQLVQSGAEVRKPGASVKVSCKTSGYTFSWYAIHWVRQAPGQRLEMWG
WINAGNGNTKYSQKFQGRVSLTRDTSASTAYMELSSLRSDDTAVYYCARPDNYGSGGDVF
DIWGQGTMVTSSTSGQAGQHHHHHHGAYPYDVPDYAS [SEQ ID NO: 842]

TABLE 202
ET200-100

DNA Sequence
aattttatgctgactcagccccactctgtgtcggagtctccggggaagacggtaaccatctcctgcacccgcagcagttgccagcaa
ctttgtgcagtggtaccagcagcgcccgggcagtgcccccacccctatgatctatgaggataacaacagaccccctggggtccctgatcggttct
ctcgcctccgtcgacagctcctccaactctgcctccctcaccatctctggactgaagactgaggacgaggctactactgtcagtcttatgatac
cagcaatgtggtattcggcggggggaccaagctgaccgtcctaggttctagaggtggtggtagcggcggcggcggctctggtggtggtgg
atccctcgagatggccgaggtgcagctggtggagtctgggggaggcttggtacagcctggagggtccctgagactctcctgtgtgcagcctctgga
ttcaccttcagtagttatgaaatgaactgggtccagggaaggggctggagtgggtttcatacattagtagtagtggtagtaccatat
actacgcagactctgtgaagggccgattcaccatctccagagacaacgccaagaactcactgtatctgcaaatgaacagcctgagagccgagga
cacggctgtttattactgtgxaxgxtgggaxtaxggtatggaxgtxggggxxaagggaxxaxgggaccacggtcaccgtctagtggccaggcc
ggccagcaccatcaccatcaccatggcgcatacccgtacgacgttccggactacgcttct [SEQ ID NO: 843]
Amino Acid Sequence
NFMLTQPHSVSESPGKTVTISCTRSSGSIASNFVQWYQQRPGSAPTPMIYEDNNRPPGVPDRF
SASVDSSSNSASLTISGLKTEDEADYYCQSYDTSNVVFGGGTKLTVLGSRGGGGSGGGGSG
GGGSLEMAEVQLVESGGGLVQPGGSLRLSCAASGFTFSSYEMNWVRQAPGKGLEWVSYIS
SSGSTIYYADSVKGRFTISRDNAKNSLYLQMNSLRAEDTAVYYCARWDYGMDVWGQGTT
VTVSSTSGQAGQHHHHHHGAYPYDVPDYAS [SEQ ID NO: 844]

TABLE 203
ET200-101

DNA Sequence
caggctgtgctgactcagccaccctcagcgtctggggcccccgggcagagggtcaccgtcttcttgttctggaagcaactccaacatcggaagta
actacgttaactggtaccagcagttcccaggaacggcccccaaactcctcatgtatagtagtagtcagcggccctcaggggtccctgaccgattct
ctggctccaagtctggcacctcagcctccctggccatcagtgggctccactctgaggatgaggctgattattactgtgctacatgggatgacagcc
tgaatgcttgggtgttcggcggagggaccaagctgaccgtcctaggttctagaggtggtggtggtagcggcggcggcggctctggtggtggtg
gatccctcgagatggccgaggtccagctggtgcagtctggggctgaggtgaggaagcctggggcctcagtgaaggtttcctgcaagacttctgg
atacaccttcacttggtatgetatacattgggtgcgccaggcccceggacaaaggettgagtggatgggatggatcaacgctggcagtggaaaca
caaaatattcacagaaatttcagggcagagtcaccettaccagggacacatccgcgagcacagcgtacatggagagagcagcctgagatctga
tgacacggctgtgtattactgtgcgagacccaataactatggttcgggtggggatgtttttgatatctggggccaagggacaatggtcaccgtactt
caactagtggccaggccggccagcaccatcaccatcaccatggcgcatacccgtacgacgttccggactacgcttct [SEQ ID NO: 845]
Amino Acid Sequence
QAVLTQPPSASGAPGQRVTVSCSGSNSNIGSNYVNWYQQFPGTAPKLLMYSSSQRPSGVPD
RFSGSKSGTSASLAISGLHSEDEADYYCATWDDSLNAWVFGGGTKLTVLGSRGGGGSGGG
GSGGGGSLEMAEVQLVQSGAEVRKPGASVKVSCKTSGYTFTWYAIHWVRQAPGQRLEWM
GWINAGSGNTKYSQKFQGRVTLTRDTSASTAYMELSSLRSDDTAVYYCARPNNYGSGGDV
FDIWGQGTMVTVSSTSGQAGQHHHHHHGAYPYDVPDYAS [SEQ ID NO: 846]

TABLE 204
ET200-102

DNA Sequence
cagtctgtcgtgacgcagccgccctcagtgtctgcggccccaggacagaaggtcaccatctcctgctctggaagcagctccaacattgggaata
attatgtatcctggtaccagcagctcccaggaacagcccccaaactcctcatttatgacaataataagcgaccctcagggattcctgaccgattctct
ggctccaagtctggcacgtcagccaccctgggcatcaccggactccagactggggacgaggccgattattactgcggaacatgggatagcagc
ctgagtgcttatgtcttcggaactgggaccaaggtcaccgtcctaggttctagaggtggtggtggtagcggcggcggcggctctggtggtggtgg
atccctcgagatggcccaggtccagctggtgcagtctggggctgaggtgaagaagcctggggcctcagtgaaagtttcctgcaaggcttctgga
tacaccttcacgaactatgctctgcattggggcgccaggcccccggacaagggcttgagtggatggcatggatcaacggtggcaatggtaaca
caaaatattcacagaacttccagggcagagtcaccattaccagggacacatccgcgagcacagcctatatggagctgagcagcctgagatctga
agacacggctgtgtattactgtgcgaaaccggaggaaacagctggaacaatccactttgactactggggccagggaaccccggtcaccgtctcc
tcaactagtggccaggccggccagcaccatcaccatcaccatggcgcatacccgtacgacgttccggactacgcttct [SEQ ID NO: 847]
Amino Acid Sequence
QSVVTQPPSVSAAPGQKVTISCSGSSSNIGNNYVSWYQQLPGTAPKLLIYDNNKRPSGIPDRF
SGSKSGTSATLGITGLQTGDEADYYCGTWDSSLSAYVFGTGTKVTVLGSRGGGGSGGGGS
GGGGSLEMAQVQLVQSGAEVKKPGASVKVSCKASGYTFTNYALHWVRQAPGQGLEWMA
WINGGNGNTKYSQNFQGRVTITRDTSASTAYMELSSLRSEDTAVYYCAKPEETAGTIHFDY
WGQGTPVTVSSTSGQAGQHHHHHHGAYPYDVPDYAS [SEQ ID NO: 848]

TABLE 205
ET200-10

DNA Sequence
caggctgtgctgactcagccccactctgtgtcggagtctccggggaagacggtaaccatctcctgcacccgcagcagtggcagcattgccagca
actatgtgcagtggtaccagcagcgcccgggcagtgcccccaccactgtgatctatgaggataaccaaagaccctctggggtccctgatcggttc
tctggctccatcgacagctcctccaactctgcctccctcaccatctctggactgaagactgaggacgaggctgactactactgtcagtcttatgatag
caccatcacggtgttcggcggagggaccaagctgaccgtcctaggttctagaggtggtggtggtagcggcggcggcggctctggtggtggtgg
atccctcgagatggcccaggtccagctggtacagtctggggctgaggtgaagaagcctgggtcctcggtgaaggtctcctgcaaggcttctgga
ggcaccttcagcagctatgctatcagctgggtgcgacaggcccctggacaagggcttgagtggatgggagggatcatccctatctttggtacagc
aaactacgcacagaagttccagggcagagtcacgattaccgcggacgaatccacgagcacagcctacatggagctgagcagcctgagatctg
aggacacggccgtgtattactgtgcgggggagggttactatgatagtagtggttattccaacggtgatgcttttgatatctggggccaagggacaat
ggtcaccgtctcttcaactagtggccaggccggccagcaccatcaccatcaccatggcgcatacccgtacgacgttccggactacgcttct [SEQ ID
NO: 849]
Amino Acid Sequence
QAVLTQPHSVSESPGKTVTISCTRSSGSIASNYVQWYQQRPGSAPTTVIYEDNQRPSGVPDRF
SGSIDSSSNSASLTISGLKTEDEADYYCQSYDSTITVFGGGTKLTVLGSRGGGGSGGGGSGG
GGSLEMAQVQLVQSGAEVKKPGSSVKVSCKASGGTFSSYAISWVRQAPGQGLEWMGGIIPI
FGTANYAQKFQGRVTITADESTSTAYMELSSLRSEDTAVYYCAGEGYYDSSGYSNGDAFDI
WGQGTMVTVSSTSGQAGQHHHHHHGAYPYDVPDYAS [SEQ ID NO: 850]

TABLE 206
ET200-104

DNA Sequence
aattttatgctgactcagccccactctgtgtcggagtctccggggaagacggtaaccatctcctgcacccgcagcagtggcagcattgccagcaa
ctatgtgcagtggtaccagcagcgcccgggcagtgcccccaccactgtgatctatgaggataaccaaagaccctctggggtccctgatcggttct
ctggctccatcgacagctcctccaactctgcctccctcaccatctctggactgaagactgaggacgaggctgactactactgtcagtcttatgatag
cagcaatgtggtattcggcggagggaccaaggtcaccgtcctaggttctagaggtggtggtggtagcggcggcggcggctctggtggtggtgg
atccctcgagatggccgaggtgcagctggtggagtctgggggaggcttggtacagcctggagggtccctgagactctcctgtgcagcctctgga
ttcaccttcagtagttatgaaatgaactgggtccgccaggctccagggaaggggctggagtgggtttcatacattagtagtagtggtagtaccatat
actacgcagactctgtgaagggccgattcaccatctccagagacaacgccaagaactcactgtatctgcaaatgaacagcctgagagccgagga
cacggctgtttattactgtgcacgctgggactacggtatggacgtctggggccaagggaccacggtcaccgtctcctcaactagtggccaggcc
ggccagcaccatcaccatcaccatggcgcatacccgtacgacgttccggactacgcttct [SEQ ID NO: 851]
Amino Acid Sequence
NFMLTQPHSVSESPGKTVTISCTRSSGSIASNYVQWYQQRPGSAPTTVIYEDNQRPSGVPDRF
SGSIDSSSNSASLTISGLKTEDEADYYCQSYDSSNVVFGGGTKVTVLGSRGGGGSGGGGSGG
GGSLEMAEVQLVESGGGLVQPGGSLRLSCAASGFTFSSYEMNWVRQAPGKGLEWVSYISSS
GSTIYYADSVKGRFTISRDNAKNSLYLQMNSLRAEDTAVYYCARWDYGMDVWGQGTTVT
VSSTSGQAGQHHHHHHGAYPYDVPDYAS [SEQ ID NO: 852]

TABLE 207
ET200-105

DNA Sequence
tcctatgtgctgactcagccaccctcagtgtccgtgtccccaggacagacagccagcatcacctgctctggagatagattgacgaataaatatgttt
cctggtatcaacagaagccaggccagtcccctgtgttggtcatctatgaggatgccaagcggccctcagggatccctgcgcgattctctggctcc
aactctgggaacacagccactctgaccatcagcgggacccaggctatggatgagtctgaatattactgtcaggcgtgggacagcagtgtggtgg
tttttggcggagggaccaagctgaccgtcctaggttctagaggtggtggtggtagcggcggcggcggctctggtggtggtggatccctcgagat
ggccgaggtgcagctggtggagtctgggggaggcttggtacagcctggcaggtccctgagactctcctgtgcagcctctggatttacctttgatg
attatgccatgcactgggtccggcaagctccagggaagggcctggagtgggtctcaggtattagttggaatagtggtagtataggctatgcggac
tctgtgaagggccgattcaccatctccagagacaacgccaagaactccctgtatctgcaaatgaacagtctgagagatgaggacacggccttgta
ttactgtgcaaaagaccgaggggggggagttatcgttaaggatgcttttgatatctggggccaagggacaatggtcaccgtctcttcaactagtggcc
aggccggccagcaccatcaccatcaccatggcgcatacccgtacgacgttccggactacgcttct [SEQ ID NO: 853]
Amino Acid Sequence
SYVLTQPPSVSVSPGQTASITCSGDRLTNKYVSWYQQKPGQSPVLVIYEDAKRPSGIPARFSG
SNSGNTATLTISGTQAMDESEYYCQAWDSSVVVFGGGTKLTVLGSRGGGGSGGGGSGGGG
SLEMAEVQLVESGGGLVQPGRSLRLSCAASGFTFDDYAMHWVRQAPGKGLEWVSGISWN
SGSIGYADSVKGRFTISRDNAKNSLYLQMNSLRDEDTALYYCAKDRGGGVIVKDAFDIWG
QGTMVTVSSTSGQAGQHHHHHHGAYPYDVPDYAS [SEQ ID NO: 854]

TABLE 208
ET200-106

DNA Sequence
tcctatgagctgactcagccacccgcagcgtctgggacccccggacagagagtcaccatctcttgttctgggggcgtctccaacatcgggagtg
gtgctctaaattggtaccagcaactcccaggaacggcccccaaactcctcatctatagttacaatcagcggccctcaggggtctctgaccgattctc
tggctccaggtctgccacctcagcctccctggccatcagtgggctccagtctgaggatgaggctgattattactgtgcaacctgggatgatagtgt
gaatggttgggtgttcggcggagggaccaagctgaccgtcctaggttctagaggtggtggtggtagcggcggcggcggctctggtggtggtgg
atccctcgagatggccgaggtgcagctggtggagtctggagctgaggtgaagaagcctggggattcagtgaaggtctcctgcaagccttctggtt
acaattttctcaactatggtatcaactgggtgcgacaggcccctggacaagggcttgagtggatgggatggattagcacttacaccggtaacaca
aactatgcacagaagctgcagggcagagtcaccttcaccacagacacatccacgagcacagcctacatggagatgaggagcctgagatctgacg
acacggccgtgtattactgtgcgcgccagcagggtggtggttggtacgatgtttggggtcaaggtactctggtcaccgtctcctcaactagtggcc
aggccggccagcaccatcaccatcaccatggcgcatacccgtacgacgttccggactacgcttct [SEQ ID NO: 855]
Amino Acid Sequence
SYELTQPPAASGTPGQRVTISCSGGVSNIGSGALNWYQQLPGTAPKLLIYSYNQRPSGVSDR
FSGSRSATSASLAISGLQSEDEADYYCATWDDSVNGWVFGGGTKLTVLGSRGGGGSGGGG
SGGGGSLEMAEVQLVESGAEVKKPGDSVKVSCKPSGYNFLNYGINWVRQAPGQGLEWMG
WISTYTGNTNYAQKLQGRVTFTTDTSTSTAYMEMRSLRSDDTAVYYCARQQGGGWYDVW
GQGTLVTVSSTSGQAGQHHHHHHGAYPYDVPDYAS [SEQ ID NO: 856]

TABLE 209
ET200-107

DNA Sequence
cagtctgtcgtgacgcagccgccctcagtgtctgcggccccaggagagaaggtcaccatctcctgctctggaagcaacttcaatgttggaaataa
tgatgtatcctggtatcagcaactcccaggtgcagcccccaaactcctcatttatgacaataataagcgaccctcagggattcctgaccgattctctg
gctccaagtctggcacgtcagccaccctggacatcaccgggctccacagtgacgacgaggccgattattactgcggaacatgggatagcagcc
tgaatactgggggggtcttcggaactgggaccaaggtcaccgtcctaggttctagaggtggtggtggtagcggcggcggcggctctggtg
gtggtggatccctcgagatggccgaggtccagctggtgcagtctggagctgaggtgaagaagcctggggcctcagtgaaggtctcctgcaaggctt
ctggttacacctttaccagctatactatcagctgggtacgacaggcccctggacaagggcttgagtggatgggatggatcagcacttacaatggtc
tcacaaactatgcacagaacctccagggcagagtcaccatgactacagacacattcacgaccacagcctacatggagctgaggagcctcagatc
tgacgacacggccgtgtattactgtgtgagagaggggtcccccgactacggtgacttcgcgtcctttgactactggggccagggaaccctggtca
ccgtctcctcaactagtggccaggccggccagcaccatcaccatcaccatggcgcatacccgtacgacgttccggactacgcttct [SEQ ID NO: 857]
Amino Acid Sequence
QSVVTQPPSVSAAPGEKVTISCSGSNFNVGNNDVSWYQQLPGAAPKLLIYDNNKRPSGIPDR
FSGSKSGTSATLDITGLHSDDEADYYCGTWDSSLNTGGVFGTGTKVTVLGSRGGGGSGGG
GSGGGGSLEMAEVQLVQSGAEVKKPGASVKVSCKASGYTFTSYTISWVRQAPGQGLEWM
GWISTYNGLTNYAQNLQGRVTMTTDTFTTTAYMELRSLRSDDTAVYYCVREGSPDYGDFA
SFDYWGQGTLVTVSSTSGQAGQHHHHHHGAYPYDVPDYAS [SEQ ID NO: 858]

TABLE 210
ET200-108

DNA Sequence
cagtctgtgttgacgcagccgccctcagtgtctgcgcccccgggacagaaggtcaccatctcctgctctggaagcagctccaacattgggaataa
ttatgtatcctggtaccagcagttcccaggaacagcccccaaactcctcatttatgacaataataagcgaccctcagggatttctgaccgattctctg
gctccaagtctggcacgtcagccaccctgggcatcgccggactccagactggggacgaggccgattattactgcggaacatgggataccagcc
tgagtggtttttatgtcttcggaagtgggaccaaggtcaccgtcctaggttctagaggtggtggtggtagcggcggcggcggctctggtggtggtg
gatccctcgagatggccgaggtccagctggtacagtctggagctgaggtgaagaagcctggggcctcagtgaaggtctcctgcaaggcttctgg
ttacacctttaccagctatactatcagctgggtacgacaggcccctggacaagggcttgagtggatgggatggatcagcacttacaatggtctcac
aaactatgcacagaacctccagggcagagtcaccatgactacagacacattcacgaccacagcctacatggagctgaggagcctcagatctga
cgacacggccgtgtattactgtgtgagagaggggtcccccgactacggtgacttcgcgtcctttgactactggggccagggaaccctggtcacc
gtctcctcaactagtggccaggccggccagcaccatcaccatcaccatggcgcatacccgtacgacgttccggactacgcttct [SEQ ID NO: 859]
Amino Acid Sequence
QSVLTQPPSVSAPPGQKVTISCSGSSSNIGNNYVSWYQQFPGTAPKLLIYDNNKRPSGISDRF
SGSKSGTSATLGIAGLQTGDEADYYCGTWDTSLSGFYVFGSGTKVTVLGSRGGGGSGGGGS
GGGGSLEMAEVQLVQSGAEVKKPGASVKVSCKASGYTFTSYTISWVRQAPGQGLEWMGW
ISTYNGLTNYAQNLQGRVTMTTDTFTTTAYMELRSLRSDDTAVYYCVREGSPDYGDFASFD
YWGQGTLVTVSSTSGQAGQHHHHHHGAYPYDVPDYAS [SEQ ID NO: 860]

TABLE 211
ET200-109

DNA Sequence
ctgcctgtgctgactcagccaccctcagcgtctgcgacccccgggcagagggtcaccatctcttgttctggaaccacctccaacatcggaagtaa
tactgtacactggtaccagcagctcccagggacggcccccaaactcctcatctataataataatcagcggccctcaggggtccctgaccgattctc
tggctccaagtctggcacctcagcctccctggccatcagtgggctccggtccgaggatgaggctacatattcctgtgcaacatgggatgacagcc
tgagtggtgtggtcttcggcggagggaccaagctgaccgtcctaggttctagaggtggtggtggtagcggcggcggcggctctggtggtggtg
gatccctcgagatggccgaggtccagctggtgcagtctggggctgaggtgaagaagcctgggtcctcggtgaaggtctcctgcaaggcttctgg
aggcaccttcagcagctatgctatcagctgggtgcgacaggcccctggacaagggcttgagtggatgggagggatcatccctatctttggtacag
caaactacgcacagaagttccagggcagagtcacgattaccgcggacgaatccacgagcacagcctacatggagctgagcagcctgagatct
gaggacacggccgtgtattactgtgcgagagatcccgcctacggtgactacgagtatgatgcttttgatatctggggccaagggacaatggtcac
cgtctcttcaactagtggccaggccggccagcaccatcaccatcaccatggcgcatacccgtacgacgttccggactacgcttct[SEQ ID NO: 861]
Amino Acid Sequence
LPVLTQPPSASATPGQRVTISCSGTTSNIGSNTVHWYQQLPGTAPKLLIYNNNQRPSGVPDRF
SGSKSGTSASLAISGLRSEDEATYSCATWDDSLSGVVFGGGTKLTVLGSRGGGGSGGGGSG
GGGSLEMAEVQLVQSGAEVKKPGSSVKVSCKASGGTFSSYAISWVRQAPGQGLEWMGGII
PIFGTANYAQKFQGRVTITADESTSTAYMELSSLRSEDTAVYYCARDPAYGDYEYDAFDIW
GQGTMVTVSSTSGQAGQHHHHHHGAYPYDVPDYAS [SEQ ID NO: 862]

TABLE 212
ET200-110

DNA Sequence
cagtctgtgttgacgcagccgccctcagcgtctgggacccccgggcagagggtcaccatctcttgttctggaagcagctccaacatcggaactaa
tggtgtaaactggttccagcagttcccaggaacggcccccaaactcctcatctatactaatgatcagcggccctcaggggtccctgaccgattctct
ggctccaagtctggcacctcagcctccctggccatcagtgggctccagtctgcggatgaggctgattattactgtgcagtgtgggaccacagcct
gaatggtccggtgttcggcggagggaccaagctgaccgtcctaggttctagaggtggtggtggtagcggcggcggcggctctggtggtggtgg
atccctcgagatggcccaggtgcagctggtgcagtctggggctgaggtgaagaagcctgggtcctcggtgaaggtctcctgcaaggcttctgga
ggcaccttcagcagctatgctatcagctgggtgcgacaggcccctggacaagggcttgagtggatgggagggatcatccctatctttggtacagc
aaactacgcacagaagttccagggcagagtcacgattaccgcggacgaatccacgagcacagcctacatggagctgagcagcctgagatctg
aggacacggccgtgtattactgtgcgagaggggccggttttgatgcttttgatatctggggccaagggacaatggtcaccgtctcttcaactagtg
gccaggccggccagcaccatcaccatcaccatggcgcatacccgtacgacgttccggactacgcttct [SEQ ID NO: 863]
Amino Acid Sequence
QSVLTQPPSASGTPGQRVTISCSGSSSNIGTNGVNWFQQFPGTAPKLLIYTNDQRPSGVPDRF
SGSKSGTSASLAISGLQSADEADYYCAVWDHSLNGPVFGGGTKLTVLGSRGGGGSGGGGS
GGGGSLEMAQVQLVQSGAEVKKPGSSVKVSCKASGGTFSSYAISWVRQAPGQGLEWMGGI
IPIFGTANYAQKFQGRVTITADESTSTAYMELSSLRSEDTAVYYCARGAGFDAFDIWGQGT
MVTVSSTSGQAGQHHHHHHGAYPYDVPDYAS [SEQ ID NO: 864]

TABLE 213
ET200-111

DNA Sequence
caggctgtgctgactcagccaccctcagcgtctgggacccccgggcagagggtcaccatctcttgttctggaagcagctccaacatcggaagta
atactgtaaactggtaccagcagctcccaggaacggcccccaaactcctcatctatagtaataatcagcggccctcaggggtccctgaccgattct
ctggctccaagtctggcacctcagcctccctggccatcagtgggctccagtctgaggatgagactgattattactgtgcagcatgggatgacagcc
tgaatggttatgtcttcggaactgggaccaaggtcaccgtcctaggttctagaggtggtggtggtagcggcggcggcggctctggtggtggtgga
tccctcgagatggcccaggtgcagctacagcagtggggcgcaggactgttgaagccttcggagaccctgtccctcacctgcgctgtctatggtg
ggtccttcagtggttactactggagctggatccgccagcccccagggaaggggctggagtggattggggaaatcaatcatagtggaagcacca
actacaacccgtccctcaagagtcgagtcaccatatcagtagacacgtccaagaaccagttctccctgaagctgagctctgtgaccgccgcggac
acggctgtgtattactgtgcgagagaggggctagatgcttttgatatctggggccaagggacaatggtcaccgtctcttcaactagtggccaggcc
ggccagcaccatcaccatcaccatggcgcatacccgtacgacgttccggactacgcttct [SEQ ID NO: 865]
Amino Acid Sequence
QAVLTQPPSASGTPGQRVTISCSGSSSNIGSNTVNWYQQLPGTAPKLLIYSNNQRSGVPDRFP
SGSKSGTSASLAISGLQSEDETDYYCAAWDDSLNGYVFGTGTKVTVLGSRGGGGSGGGGS
GGGGSLEMAQVQLQQWGAGLLKPSETLSLTCAVYGGSFSGYYWSWIRQPPGKGLEWIGEI
NHSGSTNYNPSLKSRVTISVDTSKNQFSLKLSSVTAADTAVYYCAREGLDAFDIWGQGTMV
TVSSTSGQAGQHHHHHHGAYPYDVPDYAS [SEQ ID NO: 866]

TABLE 214
ET200-112

DNA Sequence
caggctgtgctgactcagccaccctcagcgtctgggacccccgggcagagggtcaccatctcttgttctggaagcagctccaacatcggaagta
atactgtaaactggtaccagcagctcccaggaacggcccccaaactcctcatgtatagtaatgatcagcggccctcaggggtccctgaccgattct
ctggctccaagtctggcacctcagcctccctggccatcagtgggctccagtctgaggatgaggctgattattattgtgcagcatgggatgacagcc
tgaatggttatgtcttcgcagctgggacccagctcaccgttttaagttctagaggtggtggtggtagcggcggcggcggctctggtggtggtggat
ccctcgagatggcccaggtgcagctacagcagtggggcgcaggactgttgaagccttcggagaccctgtccctcacctgcgctgtctatggtgg
gtccttcagtggttactactggagctggatccgccagcccccagggaaggggctggagtggattggggaaatcaatcatagtggaagcaccaac
tacaacccgtccctcaagagtcgagtcaccatatcagtagacacgtccaagaaccagttctccctgaagctgagctctgtgaccgccgcggacac
ggctgtgtattactgtgcgagagaggggctagatgcttttgatatctggggccaagggacaatggtcaccgtctcttcaactagtggccaggccgg
ccagcaccatcaccatcaccatggcgcatacccgtacgacgttccggactacgcttct [SEQ ID NO: 867]
Amino Acid Sequence
QAVLTQPPSASGTPGQRVTISCSGSSSNIGSNTVNWYQQLPGTAPKLLMYSNDQRPSGVPDR
FSGSKSGTSASLAISGLQSEDEADYYCAAWDDSLNGYVFAAGTQLTVLSSRGGGGSGGGGS
GGGGSLEMAQVQLQQWGAGLLKPSETLSLTCAVYGGSFSGYYWSWIRQPPGKGLEWIGEI
NHSGSTNYNPSLKSRVTISVDTSKNQFSLKLSSVTAADTAVYYCAREGLDAFDIWGQGTMV
TVSSTSGQAGQHHHHHHGAYPYDVPDYAS [SEQ ID NO: 868]

TABLE 215
ET200-113

DNA Sequence
cagtctgtcgtgacgcagccgccctcagtgtctgcggccccaggacagaaggtcaccatctcctgctctggaagcagctccaacattgggaata
attatgtatcctggtaccagcagctcccaggaacagcccccaaactcctcatttatgacaataataagcgaccctcagggattcctgaccgattctct
ggctccaagtctggcacgtcagccaccctgggcatcactggactccagactggggacgaggccgattattactgcggaacatgggatagcagc
ctgagtgctgcttatgtcttcggaactgggaccaaggtcaccgtcctaggttctagaggtggtggtggtagcggcggcggcggctctggtggtgg
tggatccctcgagatggcccaggtccagctggtacagtctggagctgaggtgaagaagcctggggcctcagtgaaggtctcctgcaaggcttct
ggttacagctttaccagctatactatcagctgggttcgacaggcccctggacaaggccttgagtggatgggatgggtcagcacttacaatggtctc
agaaactatgcacagaacctccagggcagagtcaccatgactacagacacactcacgaccacagcctacatggagctgaggagcctcagatct
gacgacacggccgtgtattattgtgtgagagaggggtcccccgactacggtgacttcgcggcctttgactactggggccagggcaccctggtca
ccgtctcctcaactagtggccaggccggccagcaccatcaccatcaccatggcgcatacccgtacgacgttccggactacgcttct [SEQ ID NO: 869]
Amino Acid Sequence
QSVVTQPPSVSAAPGQKVTISCSGSSSNIGNNYVSWYQQLPGTAPKLLIYDNNKRPSGIPDRF
SGSKSGTSATLGITGLQTGDEADYYCGTWDSSLSAAYVFGTGTKVTVLGSRGGGGSGGGG
SGGGGSLEMAQVQLVQSGAEVKKPGASVKVSCKASGYSFTSYTISWVRQAPGQGLEWMG
WVSTYNGLRNYAQNLQGRVTMTTDTLTTTAYMELRSLRSDDTAVYYCVREGSPDYGDFA
AFDYWGQGTLVTVSSTSGQAGQHHHHHHGAYPYDVPDYAS [SEQ ID NO: 870]

TABLE 216
ET200-114

DNA Sequence
caggctgtgctgactcagccaccctcagcgtctgagacccccgggcagagggtcaccatctcttgttctggaagcaggtccaacatcggaacta
atattgtacactggtaccagcagcgcccaggaatggcccccaaactcctcacttatggtagtcggcggccctcaggggtcccggaccgattctct
ggctccaagtttggcacctcagcctccctggccatcagtgggctccagtctgaggatgaggctgattattattgtgcagcatgggatgacagtctg
aatggtccggctttcggcggagggaccaagctgaccgtcctaggttctagaggtggtggtggtagcggcggcggcggctctggtggtggtgga
tccctcgagatggcccaggtgcagctacagcagtggggcgcaggactgttgaagccttcggagaccctgtccctcacctgcgctgtctatggtg
ggtccttcagtggttactactggagctggatccgccagcccccagggaaggggctggagtggattggggaaatcaatcatagtggaagcacca
actacaacccgtccctcaagagtcgagtcaccatatcagtagacacgtccaagaaccagttctccctgaagctgagctctgtgaccgccgcggac
acggctgtgtattactgtgcgagagacggtgggggctactttgactactggggccagggaaccctggtcaccgtctcctcaactagtggccaggc
cggccagcaccatcaccatcaccatggcgcatacccgtacgacgttccggactacgcttct [SEQ ID NO: 871]
Amino Acid Sequence
QAVLTQPPSASETPGQRVTISCSGSRSNIGTNIVHWYQQRPGMAPKLLTYGSRRPSGVPDRF
SGSKFGTSASLAISGLQSEDEADYYCAAWDDSLNGPAFGGGTKLTVLGSRGGGGSGGGGS
GGGGSLEMAQVQLQQWGAGLLKPSETLSLTCAVYGGSFSGYYWSWIRQPPGKGLEWIGEI
NHSGSTNYNPSLKSRVTISVDTSKNQFSLKLSSVTAADTAVYYCARDGGGYFDYWGQGTL
VTVSSTSGQAGQHHHHHHGAYPYDVPDYAS [SEQ ID NO: 872]

TABLE 217
ET200-115

DNA Sequence
cagtctgtgttgacgcagccgccctcagtgtctggggccccagggcagagggtcaccatctcctgcactgggagcagctccaatatcggggca
cgttatgatgtacactggtaccagcaactcccaggaacagccccccgactcctcatctctgctaactacgatcggccctcaggggtccctgaccg
attctctggctccaagtctggcacctcagcctccctggccatcactgggctccaggctgaggatgaggctgattattactgccagtcctatgacagc
agtgtgagtgcttgggtgttcggcggagggaccaaggtcaccgtcctaggttctagaggtggtggtggtagcggcggcggcggctctggtggt
ggtggatccctcgagatggccgaagtgcagctggtgcagtctggggctgaagtgaaggagcctggggcctcagtgaggatctcctgccaggc
atctggatacaacttcatcagttattatatgcactgggtgcggcaggcccctgggcaaggtcttgagtggatgggcaccatcaacccaggcagtg
gtgagacagactactcacagaagttgcagggcagagtcaccatgaccagggacccgtccacgggtacattcgacatggggctgagcagcctg
acatctggggacacggccgtctattattgtgcgacaggtctcatcagaggagctagcgatgcttttaatatctggggccgggggacaatggtcacc
gtctcttcaactagtggccaggccggccagcaccatcaccatcaccatggcgcatacccgtacgacgttccggactacgcttct [SEQ ID NO: 873]
Amino Acid Sequence
QSVLTQPPSVSGAPGQRVTISCTGSSSNIGARYDVHWYQQLPGTAPRLLISANYDRPSGVPD
RFSGSKSGTSASLAITGLQAEDEADYYCQSYDSSVSAWVFGGGTKVTVLGSRGGGGSGGG
GSGGGGSLEMAEVQLVQSGAEVKEPGASVRISCQASGYNFISYYMHWVRQAPGQGLEWM
GTINPGSGETDYSQKLQGRVTMTRDPSTGTFDMGLSSLTSGDTAVYYCATGLIRGASDAFNI
WGRGTMVTVSSTSGQAGQHHHHHHGAYPYDVPDYAS [SEQ ID NO: 874]

TABLE 218
ET200-116

DNA Sequence
cagcctgtgctgactcagccaccctcagtgtccgtgtccccaggacagacggccgccatcccctgttctggagataagttgggggataaatttgct
tcctggtatcagcagaagccaggccagtcccctgtgctggtcatctatcaagatactaagcggccctcagggatccctgagcgattctctggctcc
aactctgggaacacagccactctgaccatcagcgggacccaggctatggatgaggctgactattactgtcagacgtgggccagcggcattgtgg
tgttcggcggagggaccaagctgaccgtcctaggttctagaggtggtggtggtagcggcggcggcggctctggtggtggtggatccctcgaga
tggcccaggtacagctgcagcagtcaggtccaggactggtgaagccctcgcagaccctctcactcacctgtgccatctccggggacagtgtctct
agcaacagtgctgcttggaactggatcaggcagtccccatcgagaggccttgagtggctgggaaggacatactacaggtccaagtggtataatg
attatgcagtatctgtgaaaagtcgaataaccatcaacccagacacatccaagaaccagttctccctgcagctgaactctgtgactcccgaggaca
cggctgtgtattactgtgcaagagagcgcagtggctggaagggatttgactactggggccagggaaccctggtcaccgtctcctcaactagtggc
caggccggccagcaccatcaccatcaccatggcgcatacccgtacgacgttccggactacgcttct [SEQ ID NO: 875]
Amino Acid Sequence
QPVLTQPPSVSVSPGQTAAIPCSGDKLGDKFASWYQQKPGQSPVLVIYQDTKRPSGIPERFSG
SNSGNTATLTISGTQAMDEADYYCQTWASGIVVFGGGTKLTVLGSRGGGGSGGGGSGGGG
SLEMAQVQLQQSGPGLVKPSQTLSLTCAISGDSVSSNSAAWNWIRQSPSRGLEWLGRTYYR
SKWYNDYAVSVKSRITINPDTSKNQFSLQLNSVTPEDTAVYYCARERSGWKGFDYWGQGT
LVTVSSTSGQAGQHHHHHHGAYPYDVPDYAS [SEQ ID NO: 876]

TABLE 219
ET200-117

DNA Sequence
gatgttgtgatgactcagtctccaccctccctgtccgtcacccctggagagccggcctccatcacctgcaggtctagtcagagcctcctggaaaga
aatgcatacaactacttggattggtacctgcagaggccaggacagtctccacagctcctgatctacttgggttctaatcgggccgccggggtccct
gacaggttcagtggcagtggatcaggcagagattttacactgaaaatcagcagagtggagcctgaggatgttggggtttattactgcatgcaagct
ctacaagctccgttcactttcggcggagggaccaaggtggagatcaaacgttctagaggtggtggtggtagcggcggcggcggctctggtggt
ggtggatccctcgagatggccgaagtgcagctggtgcagtctgggggaggcttggtacagcctggggggtccctgagactctcctgtgcagcct
ctggattcacctttagcagctatgccatgagctgggtccgccaggctccagggaaggggctggagtgggtctcagctattagtggtagtggtggt
agcacatactacgcagactccgtgaagggccggttcaccatctccagagacaattccaagaacacgctgtatctgcaaatgaacagcctgagag
ccgaggacacggccgtatattactgtgcgaaatggggcccgtttcaggatgcttttgatatctggggccaagggacaatggtcaccgtctcttcaa
ctagtggccaggccggccagcaccatcaccatcaccatggcgcatacccgtacgacgttccggactacgcttct [SEQ ID NO: 877]
Amino Acid Sequence
DVVMTQSPPSLSVTPGEPASITCRSSQSLLERNAYNYLDWYLQRPGQSPQLLIYLGSNRAAG
VPDRFSGSGSGRDFTLKISRVEPEDVGVYYCMQALQAPFTFGGGTKVEIKRSRGGGGSGGG
GSGGGGSLEMAEVQLVQSGGGLVQPGGSLRLSCAASGFTFSSYAMSWVRQAPGKGLEWV
SAISGSGGSTYYADSVKGRFTISRDNSKNTLYLQMNSLRAEDTAVYYCAKWGPFQDAFDIW
GQGTMVTVSSTSGQAGQHHHHHHGAYPYDVPDYAS [SEQ ID NO: 878]

TABLE 220
ET200-118

DNA Sequence
caggctgtgctgactcagcctgcctccgtgtctgggtctcctggacagtcgatcaccatctcctgcactggaaccagcagtgacgttggtggttata
actatgtctcctggtaccaacagcacccgggcaaagcccccaaactcatgatttatgaggtcagtaatcggccctcaggggtttctaatcgcttctct
ggctccaagtctggcaacacggcctccctgaccatctctgggctccaggctgaggacgaggctgattattactgcagctcatatacaagcagcag
caccccttatgtcttcggagcagggaccaaggtcaccgtcctaggttctagaggtggtggtggtagcggcggcggcggctctggtggtggtgga
tccctcgagatggccgaggtgcagctggtggagtctgggggaggcttggtacagcctggcaggtccctgagactctcctgtgcagcctctggatt
cacctttgatgattatgccatgcactgggtccggcaagctccagggaagggcctggagtgggtctcaggtattagttggaatagtggtagcatagg
ctatgcggactctgtgaagggccgattcaccatctccagagacaacgccaagaactccctgtatctgcaaatgaacagtctgagagctgaggaca
cggccttgtattactgtgcaaaagccaggtggacagcagtggcatcagaccaccactttgactactggggccagggaacgctggtcaccgtctc
ctcaactagtggccaggccggccagcaccatcaccatcaccatggcgcatacccgtacgacgttccggactacgcttct [SEQ ID NO: 879]
Amino Acid Sequence
QAVLTQPASVSGSPGQSITISCTGTSSDVGGYNYVSWYQQHPGKAPKLMIYEVSNRPSGVSN
RFSGSKSGNTASLTISGLQAEDEADYYCSSYTSSSTPYVFGAGTKVTVLGSRGGGGSGGGGS
GGGGSLEMAEVQLVESGGGLVQPGRSLRLSCAASGFTFDDYAMHWVRQAPGKGLEWVSG
ISWNSGSIGYADSVKGRFTISRDNAKNSLYLQMNSLRAEDTALYYCAKARWTAVASDHHF
DYWGQGTLVTVSSTSGQAGQHHHHHHGAYPYDVPDYAS [SEQ ID NO: 880]

TABLE 221
ET200-119

DNA Sequence
caggctgtgcttactcagccaccctcagcgtctgggacccccgggcagagggtcaccatctcttgttctggaagcagctccaacatcggaagtaa
tactgtaaactggtaccagcagctcccaggaacggcccccaaactcctcatctatagtaataatcagcggccctcaggggtccctgaccgattctc
tggctccaagtctggcacctcagcctccctggccatcagtgggctccagtctgaggatgaggctgattattactgtgcagcatgggatgacagcct
gaatggttatgtcttcggaactgggaccaagctgaccgtcctaggttctagaggtggtggtggtagcggcggcggcggctctggtggtggtggat
ccctcgagatggccgaggtgcagctggtgcagtctggggctgaggtgaagaagcctgggtcctcggtgaaggtctcctgcaaggcttctggag
gcaccttcagcagctatgctatcagctgggtgcgacaggcccctggacaagggcttgagtggatgggagggatcatccctatctttggtacagca
aactacgcacagaagttccagggcagagtcacgattaccgcggacgaatccacgagcacagcctacatggagctgagcagcctgagatctga
ggacacggccgtgtattactgtgcgagagattgggactacatggacgtctggggcaaagggaccacggtcaccgtctcctcaactagtggccag
gccggccagcaccatcaccatcaccatggcgcatacccgtacgacgttccggactacgcttct [SEQ ID NO: 881]
Amino Acid Sequence
QAVLTQPPSASGTPGQRVTISCSGSSSNIGSNTVNWYQQLPGTAPKLLIYSNNQRPSGVPDRF
SGSKSGTSASLAISGLQSEDEADYYCAAWDDSLNGYVFGTGTKLTVLGSRGGGGSGGGGS
GGGGSLEMAEVQLVQSGAEVKKPGSSVKVSCKASGGTFSSYAISWVRQAPGQGLEWMGGI
IPIFGTANYAQKFQGRVTITADESTSTAYMELSSLRSEDTAVYYCARDWDYMDVWGKGTT
VTVSSTSGQAGQHHHHHHGAYPYDVPDYAS [SEQ ID NO: 882]

TABLE 222
ET200-120

DNA Sequence
tcctatgagctgactcagccaccctcagcgtctgggacccccgggcagagggtcaccatctcttgttctggaagcagctccaacatcggaagtaa
tactgtaaactggtaccagcagctcccaggaacggcccccaaactcctcatctatagtaataatcagcggccctcaggggtccctgaccgattctc
tggctccaagtctggcacctcagcctccctggccatcagtgggctccagtctgaggatgaggctgattattactgtgcagcatgggatgacagcct
gaatggttatgtcttcggaactgggaccaaggtcaccgtcctaggttctagaggtggtggtggtagcggcggcggcggctctggtggtggtggat
ccctcgagatggccgaggtgcagctggtggagtctggagctgaggtgaagaagcctggggcctcagtgaaggtctcctgcaaggcttctggtta
cacctttaccagctatggtatcagctgggtgcgacaggcccctggacaagggcttgagtggatgggatggatcagcgcttacaatggtaacacaa
actatgcacagaagctccagggcagagtcaccatgaccacagacacatccacgagcacagcctacatggagctgaggagcctgagatctgac
gacacggccgtgtattactgtgcgagagacctatctcggggagctaacccgcattactactactactacggtatggacgtctggggccaaggac
cacggtcaccgtctcctcaactagtggccaggccggccagcaccatcaccatcaccatggcgcatacccgtacgacgttccggactacgcttct
[SEQ ID NO: 883]
Amino Acid Sequence
SYELTQPPSASGTPGQRVTISCSGSSSNIGSNTVNWYQQLPGTAPKLLIYSNNQRPSGVPDRF
SGSKSGTSASLAISGLQSEDEADYYCAAWDDSLNGYVFGTGTKVTVLGSRGGGGSGGGGS
GGGGSLEMAEVQLVESGAEVKKPGASVKVSCKASGYTFTSYGISWVRQAPGQGLEWMGW
ISAYNGNTNYAQKLQGRVTMTTDTSTSTAYMELRSLRSDDTAVYYCARDLSRGANPHYYY
YYGMDVWGQGTTVTVSSTSGQAGQHHHHHHGAYPYDVPDYAS [SEQ ID NO: 884]

TABLE 223
ET200-121

DNA Sequence
cagtctgtgttgacgcagccgccctcagtgtctggggccccagggcagagggtcaccgtctcctgcactgggagcagatccaacatcggggca
ggatatgatgtacactggtaccagcaacttccaggaacagcccccaaactcctcatctatggaaatagtaatcggcctccaggggtccctgaccg
attctctgggtctaagtctggcacctcagcctccctggtcatcactgggctccaggctgaggatgccgctgattattactgccagtcctatgacaaca
ctgtgcgtgaatcaccttatgtcttcggaactgggaccaaggtcaccgtcctaggttctagaggtggtggtggtagcggcggcggcggctctggt
ggtggtggatccctcgagatggccgaggtccagctggtacagtctggggctgaggtgaagaagcctggggcctcagtgaaggtctcctgcaag
gtttccggatacaccctcactgaattatccatgcactgggtgcgacaggctcctggaaaagggcttgagtggatgggaggttttgatcctgaagat
ggtgaaacaatctacgcacagaagttccagggcagagtcaccatgaccgaggacacatctacagacacagcctacatggagctgagcagcctg
agatctgaggacacggccgtgtattactgtgcaacagagagtaatttagtgtcccggcactactactactacggtatggacgtctggggccaaggg
accacggtcaccgtctcctcaactagtggccaggccggccagcaccatcaccatcaccatggcgcatacccgtacgacgttccggactacgcttct
[SEQ ID NO: 885]
Amino Acid Sequence
QSVLTQPPSVSGAPGQRVTVSCTGSRSNIGAGYDVHWYQQLPGTAPKLLIYGNSNRPPGVP
DRFSGSKSGTSASLVITGLQAEDAADYYCQSYDNTVRESPYVFGTGTKVTVLGSRGGGGSG
GGGSGGGGSLEMAEVQLVQSGAEVKKPGASVKVSCKVSGYTLTELSMHWVRQAPGKGLE
WMGGFDPEDGETIYAQKFQGRVTMTEDTSTDTAYMELSSLRSEDTAVYYCATESNLVSRH
YYYYGMDVWGQGTTVTVSSTSGQAGQHHHHHHGAYPYDVPDYAS [SEQ ID NO: 886]

TABLE 224
ET200-122

DNA Sequence
ctgcctgtgctgactcagccaccctcagcgtctgggacccccgggcagagggtcaccatctcttgttctggaaccagctccaacatcggaagtaa
ttctgtagactggtaccagcagctcccaggaacggcccccaaactcctcatctatagtaataatcagcggccctcaggggtccctgaccgaatctc
tggctccaagtctggcacctcagcctccctggccatcagtgggctccagtctgaggatgaggctgattattactgtgcagcatgggatgacagcct
gaatggttatgtcttcggaactgggaccaaggtcaccgtcctaggttctagaggtggtggtggtagcggcggcggcggctctggtggtggtggat
ccctcgagatggccgaagtgcagctggtgcagtctggggctgaggtgaagaagcctggggcctcagtgaaggtctcctgcaaggcttctggat
acaccttcaccggctactatatgcactgggtgcgacaggcccctggacaagggcttgagtggatgggatggatcaaccctaacagtggtggcac
aaactatgcacagaagtttcagggcagggtcaccatgaccagggacacgtccatcagcacagcctacatggagctgagcaggctgagatctga
cgacacggccgtgtattactgtgcgagagattacggatactatggttcggggagttattcgagcggccccctttactactactacggtatggacg
tctggggccaagggaccacggtcaccgtctcctcaactagtggccaggccggccagcaccatcaccatcaccatggcgcata
cccgtacgacgttccggactacgcttct [SEQ ID NO: 887]
Amino Acid Sequence
LPVLTQPPSASGTPGQRVTISCSGTSSNIGSNSVDWYQQLPGTAPKLLIYSNNQRPSGVPDRIS
GSKSGTSASLAISGLQSEDEADYYCAAWDDSLNGYVFGTGTKVTVLGSRGGGGSGGGGSG
GGGSLEMAEVQLVQSGAEVKKPGASVKVSCKASGYTFTGYYMHWVRQAPGQGLEWMG
WINPNSGGTNYAQKFQGRVTMTRDTSISTAYMELSRLRSDDTAVYYCARDYGYYGSGSYS
SGPLYYYYGMDVWGQGTTVTVSSTSGQAGQHHHHHHGAYPYDVPDYAS [SEQ ID NO: 888]

TABLE 225
ET200-123

DNA Sequence
caggctgtgctgactcagccaccctcagcgtctgggacccccgggcagagggtcaccatctcttgttctggaagcagctccaacatcggaagta
atactgtaaactggtaccagcagctcccaggaacggcccccaaactcctcatgtataataatgatcagcggccctcaggggtccctgaccgattct
ctggctccaagtctggcacctcagcctccctggccatcagtgggctccagtctgaggatgaggctgattattactgtgcagcatgggatgacagc
ctcaatggttatgtcttcggacctgggaccaaggtcaccgtcctaggttctagaggtggtggtggtagcggcggcggcggctctggtggtggtgg
atccctcgagatggcccaggtgcagctggtggagtctggagctgaggtgaagaagcctggggcctcagtgaaggtctcctgcaaggcttctggt
tacacctttaccagctatggtatcagctgggtgcgacaggcccctggacaagggcttgagtggatgggatggatcagcgcttacaatggtaacac
aaactatgcacagaagctccagggcagagtcaccatgaccacagacacatccacgagcacagcctacatggagctgaggagcctgagatctg
acgacacggccgtgtattactgtgcgagagacctatctcggggagctaacccgcattactactactactacggtatggacgtctggggccaaggg
accacggtcaccgtctcctcaactagtggccaggccggccagcaccatcaccatcaccatggcgcatacccgtacgacgttccggactacgcttct
[SEQ ID NO: 889]
Amino Acid Sequence
QAVLTQPPSASGTPGQRVTISCSGSSSNIGSNTVNWYQQLPGTAPKLLMYNNDQRPSGVPD
RFSGSKSGTSASLAISGLQSEDEADYYCAAWDDSLNGYVFGPGTKVTVLGSRGGGGSGGG
GSGGGGSLEMAQVQLVESGAEVKKPGASVKVSCKASGYTFTSYGISWVRQAPGQGLEWM
GWISAYNGNTNYAQKLQGRVTMTTDTSTSTAYMELRSLRSDDTAVYYCARDLSRGANPH
YYYYYGMDVWGQGTTVTVSSTSGQAGQHHHHHHGAYPYDVPDYAS [SEQ ID NO: 890]

TABLE 226
ET200-125

DNA Sequence
aattttatgctgactcagccccacgctgtgtcggagtctccggggaagacggtaaccatctcctgcacccgcagcagtggcagtattgccagcaa
ctatgtgcagtggtaccagcagcgcccgggcagttccccccgcactgtgatttatgaggataatcaaagaccctctggggtccctggtcggttctc
tggctccatcgacagctcctccaactctgcctccctcaccatctctggactgaagactgaggacgaggctgactactactgtcagtcttatgattcca
ccagtgtgcttttcggcggagggaccaagctgaccgtcctaggttctagaggtggtggtggtagcggcggcggcggctctggtggtggtggatc
cctcgagatggccgaggtccagctggtgcagtctggggctgaggtgaagaagccagggtcctcggtgaaggtctcctgcaaggcctcgggag
gcaccttcagcagcaattctctcagctgggtgcgacaggcccctggacaagggcttgagtggatgggaaggatcttccctatcctgggtataaca
aactatgcacagaagttccagggcagagtcacgattaccgcggacaaatccacgagcacagcctacatggagctgagcagcctgagatctgag
gacacggccgtctattactgtgcgagaggaaactaccaatggtatgatgcttttgatatctggggccaagggacaatggtcaccgtctcttcaacta
tagtggccaggccggccagcaccatcaccatcaccatggcgcatacccgtacgacgttccggactacgcttct [SEQ ID NO: 891]
Amino Acid Sequence
NFMLTQPHAVSESPGKTVTISCTRSSGSIASNYVQWYQQRPGSSPRTVIYEDNQRPSGVPGR
FSGSIDSSSNSASLTISGLKTEDEADYYCQSYDSTSVLFGGGTKLTVLGSRGGGGSGGGGSG
GGGSLEMAEVQLVQSGAEVKKPGSSVKVSCKASGGTFSSNSLSWVRQAPGQGLEWMGRIF
PILGITNYAQKFQGRVTITADKSTSTAYMELSSLRSEDTAVYYCARGNYQWYDAFDIWGQG
TMVTVSSTSGQAGQHHHHHHGAYPYDVPDYAS [SEQ ID NO: 892]

TABLE 227
ET200-005

DNA Sequence
cagcctgtgctgactcagccaccctcagtgtcagtggtcccaggaaagacggccaggattacctgtgggggaaaaaacattggaagtaaaagtgt
gcactggtaccagcagaagccaggccaggcccctgtggtggtcatccattatgatagtgaccggccctcagggatccctgagcgattctctggc
tccaactctgggaacacggccaccctgaccatcagcagggtcgaagccggggatgaggccgactattactgtcaggtgtgggatagtagtagtg
atcatccttatgtcttcggaactgggaccaaggtcaccgtcctaggttctagaggtggtggtggtagcggcggcggcggctctggtggtggtgga
tccctcgagatggcccaggtgcagctggtgcagtctggagctgaggtgaagaagcctggggcctcagtgaaggtctcctgcaaggcttctggtt
acacctttaccaactatggtatcagctgggtgcgacaggcccctggacaagggcttgagtggatgggatggatcagcgcttacaatggtaacaca
aactatgcacataagctccagggcagagtcaccatgaccacagacacatccacgagcacagccaacatggagctgaggagcctgagacctga
cgacactgccgtgtattactgtgcgcgctcttacttcggttctcatgattactggggtcaaggtactctggtgaccgtctcctcaactagtggccagg
ccggccagcaccatcaccatcaccatggcgcatacccgtacgacgttccggactacgcttct [SEQ ID NO: 893]
Amino Acid Sequence
QPVLTQPPSVSVVPGKTARITCGGKNIGSKSVHWYQQKPGQAPVVVIHYDSDRPSGIPERFS
GSNSGNTATLTISRVEAGDEADYYCQVWDSSSDHPYVFGTGTKVTVLGSRGGGGSGGGGS
GGGGSLEMAQVQLVQSGAEVKKPGASVKVSCKASGYTFTNYGISWVRQAPGQGLEWMG
WISAYNGNTNYAHKLQGRVTMTTDTSTSTANMELRSLRPDDTAVYYCARSYFGSHDYWG
QGTLVTVSSTSGQAGQHHHHHHGAYPYDVPDYAS [SEQ ID NO: 894]

TABLE 228
ET200-124

DNA Sequence
tcctatgtgctgactcagccaccctcggtgtcagtggccccaggaaagacggccaggatttcctgtgggggaaacgacattggaagtaaaagtgt
tttctggtatcagcagaggccaggccaggcccctgtgttggtcgtctatgatgatagcgaccggccctcagggctccctgagcgattctctggctt
caactctgggaacacggccaccctgaccatcagcagggtcgaagccggggatgaggccgactattactgtcaagtgtgggatagtagtagtgat
cattatgtcttcggaactgggaccaaggtcaccgtcctaggttctagaggtggtggtggtagcggcggcggcggctctggtggtggtggatccct
cgagatggcccaggtgcagctggtggagtctgggggaggcttggtacagcctggcaggtccctgagactctcctgtgcagcctctggattcacc
tttgatgattatgccatgcactgggtccggcaagctccagggaagggcctggagtgggtctcaggtattagttggaatagtggtagcataggctat
gcggactctgtgaagggccgattcaccatctccagagacaacgccaagaactccctgtatctgcaaatgaacagtctgagagctgaggacacgg
ccttgtattactgtgcaaaagatataacctatggttcggggagttatggtgcttttgatatctggggccaagggacaatggtcaccgtctctt
caactagtggccaggccggccagcaccatcaccatcaccatggcgcatacccgtacgacgttccggactacgcttct [SEQ ID NO: 895]
Amino Acid Sequence
SYVLTQPPSVSVAPGKTARISCGGNDIGSKSVFWYQQRPGQAPVLVVYDDSDRPSGLPERFS
GFNSGNTATLTISRVEAGDEADYYCQVWDSSSDHYVFGTGTKVTVLGSRGGGGSGGGGSG
GGGSLEMAQVQLVESGGGLVQPGRSLRLSCAASGFTFDDYAMHWVRQAPGKGLEWVSGI
SWNSGSIGYADSVKGRFTISRDNAKNSLYLQMNSLRAEDTALYYCAKDITYGSGSYGAFDI
WGQGTMVTVSSTSGQAGQHHHHHHGAYPYDVPDYAS [SEQ ID NO: 896]

TABLE 229

| Anti- | | | | | | |
|---|---|---|---|---|---|---|
| body | V_{H}CDR1 | V_{H}CDR2 | V_{H}CDR3 | V_{L}CDR1 | V_{L}CDR2 | V_{L}CDR3 |
| ET200- | GGSFSGYY | INHSGST | AREGPYDGFDS | SSNIGSNT | SNN | AAWDDSLNGYV |
| 001 | [SEQ ID | [SEQ ID | [SEQ ID NO: 311] | [SEQ ID | [SEQ ID | [SEQ ID NO: 314] |
| | NO: 309] | NO: 310] | | NO: 312] | NO: 313] | |
| ET200- | GYPFNKYD | IIPIFRTT | AREWFYWDI | SGSIASNY | EDN | QSYDSSNSVV |
| 002 | [SEQ ID | [SEQ ID | [SEQ ID NO: 317] | [SEQ ID | [SEQ ID | [SEQ ID NO: 320] |
| | NO: 315] | NO: 316] | | NO: 318] | NO: 319] | |
| ET200- | GFTFSSYG | ISHDGSNK | ARSNQWSGYFSFDY | KLGTKY | EDN | QAWDSDTFVV |
| 003 | [SEQ ID | [SEQ ID | [SEQ ID NO: 323] | [SEQ ID | [SEQ ID | [SEQ ID NO: 325] |
| | NO: 321] | NO: 322] | | NO: 324] | NO: 319] | |
| ET200- | GYTFTNYG | ISAYNGNT | ARSYFGSHDY | NIGSKS | YDS | QVWDSSSDHPYV |
| 005 | [SEQ ID | [SEQ ID | [SEQ ID NO: 328] | [SEQ ID | [SEQ ID | [SEQ ID NO: 331] |
| | NO: 326] | NO: 327] | | NO: 329] | NO: 330] | |
| ET200- | GYTFTTYG | INTYNGHT | ARVIYGSGDY | NIGSKS | YDS | QVWDSSSDHPYV |
| 006 | [SEQ ID | [SEQ ID | [SEQ ID NO: 334] | [SEQ ID | [SEQ ID | [SEQ ID NO: 331] |
| | NO: 332] | NO: 333] | | NO: 329] | NO: 330] | |
| ET200- | GYSISSGYF | IYHSRST | ARGYGYFDY | NIGSKT | YDS | QVWDSSDHRV |
| 007 | [SEQ ID | [SEQ ID | [SEQ ID NO: 337] | [SEQ ID | [SEQ ID | [SEQ ID NO: 339] |
| | NO: 335] | NO: 336] | | NO: 338] | NO: 330] | |
| ET200- | GFTFGDYG | INWNGGST | ARSKYNFHVYYDY | SSDVGGYNY | DVS | SSYTSSSTSKV |
| 008 | [SEQ ID | [SEQ ID | [SEQ ID NO: 342] | [SEQ ID | [SEQ ID | [SEQ ID NO: 345] |
| | NO: 340] | NO: 341] | | NO: 343] | NO: 344] | |
| ET200- | GYTFTSYG | ISAYNGNT | ARSSGNMVSWKDM | NSNIGSNY | RNN | AAWDDSLSAYV |
| 009 | [SEQ ID | [SEQ ID | [SEQ ID NO: 347] | [SEQ ID | [SEQ ID | [SEQ ID NO: 350] |
| | NO: 346] | NO: 327] | | NO: 348] | NO: 349] | |
| ET200- | GYTFTSYG | ISAYNGNT | ARGAVAYHD | SSDVGGYNS | DVS | SSYTSSSTPLV |
| 010 | [SEQ ID | [SEQ ID | [SEQ ID NO: 351] | [SEQ ID | [SEQ ID | [SEQ ID NO: 353] |
| | NO: 346] | NO: 327] | | NO: 352] | NO: 344] | |
| ET200- | GGTLSSYA | IIPMFGTA | ARGVHYASFDH | SSNISIYD | GNN | GTWDDSLSGGV |
| 011 | [SEQ ID | [SEQ ID | [SEQ ID NO: 356] | [SEQ ID | [SEQ ID | [SEQ ID NO: 359] |
| | NO: 354] | NO: 355] | | NO: 357] | NO: 358] | |
| ET200- | GFPFNIFG | ISGYNGNT | ARGAYGGMDT | DSNIGNNY | DVK | GTWDSRLDAYV |
| 012 | [SEQ ID | [SEQ ID | [SEQ ID NO: 362] | [SEQ ID | [SEQ ID | [SEQ ID NO: 365] |
| | NO: 360] | NO: 361] | | NO: 363] | NO: 364] | |
| ET200- | GYMFTSYG | ISANNGKT | ARHIGGSYFDR | TSNIGAGYD | TNN | GTWDSSLSAVV |
| 013 | [SEQ ID | [SEQ ID | [SEQ ID NO: 368] | [SEQ ID | [SEQ ID | [SEQ ID NO: 371] |
| | NO: 366] | NO: 367] | | NO: 369] | NO: 370] | |
| ET200- | GFTFSSYA | ISGSDGST | ARSHEANLVGDW | NIGSKS | YDS | QVWDSSSDHYV |
| 014 | [SEQ ID | [SEQ ID | [SEQ ID NO: 374] | [SEQ ID | [SEQ ID | [SEQ ID NO: 375] |
| | NO: 372] | NO: 373] | | NO: 329] | NO: 330] | |
| ET200- | GYTFTSYG | ISAYNGNT | ARWGGFGAVDH | NIGSKS | YDS | QVWDSSSDVV |
| 015 | [SEQ ID | [SEQ ID | [SEQ ID NO: 376] | [SEQ ID | [SEQ ID | [SEQ ID NO: 377] |
| | NO: 346] | NO: 327] | | NO: 329] | NO: 330] | |
| ET200- | GFTFSSYS | ISSSSSYI | ARGQGYDY | SLTDYH | ATN | NSRDSGTDEVL |
| 016 | [SEQ ID | [SEQ ID | [SEQ ID NO: 380] | [SEQ ID | [SEQ ID | [SEQ ID NO: 383] |
| | NO: 378] | NO: 379] | | NO: 381] | NO: 382] | |
| ET200- | GGSFSGYY | INHSGST | ARYYPGMDM | NIGSKS | DDS | QVWDSSSDHTV |
| 017 | [SEQ ID | [SEQ ID | [SEQ ID NO: 384] | [SEQ ID | [SEQ ID | [SEQ ID NO: 386] |
| | NO: 309] | NO: 310] | | NO: 329] | NO: 385] | |
| ET200- | GYTLNELS | FDPEDGET | ARGGYGDS | SSNIGRNG | NDN | AAWDDSLHGVV |
| 018 | [SEQ ID | [SEQ ID | [SEQ ID NO: 389] | [SEQ ID | [SEQ ID | [SEQ ID NO: 392] |
| | NO: 387] | NO: 388] | | NO: 390] | NO: 391] | |
| ET200- | GGTFSSDA | IIPMFGTA | AREGYYYPSAYLGSVLNDISSVYDE | SGSIASNY | EDN | QSYDSSNSWV |
| 019 | [SEQ ID | [SEQ ID | [SEQ ID NO: 394] | [SEQ ID | [SEQ ID | [SEQ ID NO: 395] |
| | NO: 393] | NO: 355] | | NO: 318] | NO: 319] | |
| ET200- | GYTFTSYG | ISAYNGNT | ARSMTSFDY | TSNIGNND | DNN | GTWDSSVSAS |
| 020 | [SEQ ID | [SEQ ID | [SEQ ID NO: 396] | [SEQ ID | [SEQ ID | [SEQ ID NO: 399] |
| | NO: 346] | NO: 327] | | NO: 397] | NO: 398] | |
| ET200- | GYTFTSYG | ISAYNGNT | ARSVYDLDT | NSNIGNNY | DNN | GTWNTTVTPGYV |
| 021 | [SEQ ID | [SEQ ID | [SEQ ID NO: 400] | [SEQ ID | [SEQ ID | [SEQ ID NO: 402] |
| | NO: 346] | NO: 327] | | NO: 401] | NO: 398] | |
| ET200- | GFTFDDYA | ISWNSGSI | ARYRQVGSAYDS | SSNIGNNY | DNN | GTWDSSLGAPYV |
| 022 | [SEQ ID | [SEQ ID | [SEQ ID NO: 405] | [SEQ ID | [SEQ ID | [SEQ ID NO: 407] |
| | NO: 403] | NO: 404] | | NO: 406] | NO: 398] | |
| ET200- | GYTFTSYG | ISAYNGNT | ARYWGFGVSDR | NIGSKS | ADS | QVWDSSSYHNYV |
| 023 | [SEQ ID | [SEQ ID | [SEQ ID NO: 408] | [SEQ ID | [SEQ ID | [SEQ ID NO: 410] |
| | NO: 346] | NO: 327] | | NO: 329] | NO: 409] | |
| ET200- | GGTFSSYA | IIPIFGTA | ARYNYYYYDS | SGSIASNY | EDN | QSYDSSNLWV |
| 024 | [SEQ ID | [SEQ ID | [SEQ ID NO: 413] | [SEQ ID | [SEQ ID | [SEQ ID NO: 414] |
| | NO: 411] | NO: 412] | | NO: 318] | NO: 319] | |
| ET200- | GGTFSSYA | IIPIFGTA | ARYWGYDSYDE | QSISSY | AAS | QQSYSTPFT |
| 025 | [SEQ ID | [SEQ ID | [SEQ ID NO: 415] | [SEQ ID | [SEQ ID | [SEQ ID NO: 418] |
| | NO: 411] | NO: 412] | | NO: 416] | NO: 417] | |
| ET200- | GGTFSSYA | IIPIFGTA | ARNNHYYNDY | SGSIASNY | EDN | QSYDSSNWV |
| 026 | [SEQ ID | [SEQ ID | [SEQ ID NO: 349] | [SEQ ID | [SEQ ID | [SEQ ID NO: 419] |
| | NO: 411] | NO: 412] | | NO: 318] | NO: 319] | |
| ET200- | GYTFTDYY | VDPEDGET | ARYWSYSFDYLYMPEGNDW | SSNIGAGYD | GNN | QSYDSSLSDVV |
| 027 | [SEQ ID | [SEQ ID | [SEQ ID NO: 422] | [SEQ ID | [SEQ ID | [SEQ ID NO: 424] |
| | NO: 420] | NO: 421] | | NO: 423] | NO: 358] | |
| ET200- | GYNFLNYG | ISTYTGNT | ARDLYYYEGVDY | VSNIGSGA | SYN | ATWDDSVNG |
| 028 | [SEQ ID | [SEQ ID | [SEQ ID NO: 427] | [SEQ ID | [SEQ ID | [SEQ ID NO: 430] |
| | NO: 425] | NO: 426] | | NO: 428] | NO: 429] | |
| ET200- | GFTFSSYA | ISYDGSNK | ARSYFTSGFYDY | NIGSES | YDT | QVWDSSRDHVV |
| 029 | [SEQ ID | [SEQ ID | [SEQ ID NO: 432] | [SEQ ID | [SEQ ID | [SEQ ID NO: 435] |
| | NO: 372] | NO: 431] | | NO: 433] | NO: 434] | |
| ET200- | GYTLTELS | FDPEDGET | ARMSSMYYD | SSNIGAGYD | GNS | QSYDSSLSGSYV |
| 030 | [SEQ ID | [SEQ ID | [SEQ ID NO: 437] | [SEQ ID | [SEQ ID | [SEQ ID NO: 439] |
| | NO: 436] | NO: 388] | | NO: 423] | NO: 438] | |
| ET200- | GFTVSDYY | ISGSGNSI | ARSTKFDY | NIGSKS | YDS | QVWDSSSDYV |
| 031 | [SEQ ID | [SEQ ID | [SEQ ID NO: 442] | [SEQ ID | [SEQ ID | [SEQ ID NO: 443] |
| | NO: 440] | NO: 441] | | NO: 329] | NO: 330] | |
| ET200- | GYSFTNYW | IYPGDSDT | ARSTGSSHMSDE | SSNVGSYT | NNN | AAWDDRLGGYV |
| 032 | [SEQ ID | [SEQ ID | [SEQ ID NO: 446] | [SEQ ID | [SEQ ID | [SEQ ID NO: 449] |
| | NO: 444] | NO: 445] | | NO: 447] | NO: 448] | |
| ET200- | GGSFSGYY | ITHSGRS | ARSSIMSDY | SGSIASNY | EDN | QSYDSSNHWV |
| 033 | [SEQ ID | [SEQ ID | [SEQ ID NO: 451] | [SEQ ID | [SEQ ID | [SEQ ID NO: 452] |
| | NO: 309] | NO: 450] | | NO: 318] | NO: 319] | |
| ET200- | GGTFSSYA | IIPIFGTA | ARGSALDHYDR | TSNIGAGYD | NNR | GTWDGSLTGAV |
| 034 | [SEQ ID | [SEQ ID | [SEQ ID NO: 453] | [SEQ ID | [SEQ ID | [SEQ ID NO: 455] |
| | NO: 411] | NO: 412] | | NO: 369] | NO: 454] | |
| ET200- | GGTFSSYA | IIPIFGTA | ARYNYYFNDY | SGSIASNY | EDN | QSYDSTNWV |
| 035 | [SEQ ID | [SEQ ID | [SEQ ID NO: 456] | [SEQ ID | [SEQ ID | [SEQ ID NO: 457] |
| | NO: 411] | NO: 412] | | NO: 318] | NO: 319] | |
| ET200- | GYTFTSYG | ISAYNGNT | ARSMFGAHDS | NIGSKS | YDS | QVWDSSSDHPYV |
| 037 | [SEQ ID | [SEQ ID | [SEQ ID NO: 458] | [SEQ ID | [SEQ ID | [SEQ ID NO: 331] |
| | NO: 346] | NO: 327] | | NO: 329] | NO: 330] | |
| ET200- | GGTFSSYA | IIPIFGTA | ARGASFDRHDN | SSNIGAGFD | ANS | QSYDSSLSGVV |
| 038 | [SEQ ID | [SEQ ID | [SEQ ID NO: 459] | [SEQ ID | [SEQ ID | [SEQ ID NO: 462] |
| | NO: 411] | NO: 412] | | NO: 460] | NO: 461] | |
| ET200- | GGTFSSYA | IIPIFGTA | ARSNYYYNDY | SGSIASNY | EDN | QSYDSSNWV |
| 039 | [SEQ ID | [SEQ ID | [SEQ ID NO: 463] | [SEQ ID | [SEQ ID | [SEQ ID NO: 419] |
| | NO: 411] | NO: 412] | | NO: 318] | NO: 319] | |
| ET200- | GYTLTELS | FDPEDGET | ARYSGVYYD | SSNIGAGYD | GNS | ASYDSSLSGYV |
| 040 | [SEQ ID | [SEQ ID | [SEQ ID NO: 464] | [SEQ ID | [SEQ ID | [SEQ ID NO: 465] |
| | NO: 436] | NO: 388] | | NO: 423] | NO: 438] | |
| ET200- | GGTFSSYA | MNPNSGNT | ARYYSYGYD | SGSIADNF | NDD | QSYDNNNRGV |
| 041 | [SEQ ID | [SEQ ID | [SEQ ID NO: 467] | [SEQ ID | [SEQ ID | [SEQ ID NO: 470] |
| | NO: 411] | NO: 466] | | NO: 468] | NO: 469] | |
| ET200- | GDSVSTNSVA | TYYRSKWSN | ARSSSWYQIFDY | SSNIGTGYF | GNN | QSYDSSLSGYV |
| 042 | [SEQ ID | [SEQ ID | [SEQ ID NO: 473] | [SEQ ID | [SEQ ID | [SEQ ID NO: 465] |
| | NO: 471] | NO: 472] | | NO: 474] | NO: 358] | |
| ET200- | GFTFSSYA | ISGSGGST | ARSGAYWDYSVYDE | SDSIANNY | EDV | QSYHSDNRWV |
| 043 | [SEQ ID | [SEQ ID | [SEQ ID NO: 486] | [SEQ ID | [SEQ ID | [SEQ ID NO: 479] |
| | NO: 372] | NO: 475] | | NO: 477] | NO: 478] | |
| ET200- | GGSISSSNW | IYHSGSP | ARMTTHTFGYDA | KLGDKY | QDN | QAWDSSTYVA |
| 044 | [SEQ ID | [SEQ ID | [SEQ ID NO: 482] | [SEQ ID | [SEQ ID | [SEQ ID NO: 485] |
| | NO: 480] | NO: 481] | | NO: 483] | NO: 484] | |
| ET200- | GYTFTSYG | ISAYNGNT | ARGVHLDW | NIGSES | DDA | QVWDRNSAQFV |
| 045 | [SEQ ID | [SEQ ID | [SEQ ID NO: 486] | [SEQ ID | [SEQ ID | [SEQ ID NO: 488] |
| | NO: 346] | NO: 327] | | NO: 433] | NO: 487] | |
| ET200- | GGSFSGYY | INHSGST | ARLYEGGYHGWGSWLSSDS | SSNIGSNY | SNN | AAWDDSLSGYV |
| 069 | [SEQ ID | [SEQ ID | [SEQ ID NO: 489] | [SEQ ID | [SEQ ID | [SEQ ID NO: 491] |
| | NO: 309] | NO: 310] | | NO: 490] | NO: 313] | |
| ET200- | GGSFSGYY | INHSGST | AREGAFDAFDI | SSNIGSNT | SNN | AAWDDSLNGY |
| 078 | [SEQ ID | [SEQ ID | [SEQ ID NO: 492] | [SEQ ID | [SEQ ID | [SEQ ID NO: 493] |
| | NO: 309] | NO: 310] | | NO: 312] | NO: 313] | |
| ET200- | GFTFDDYA | ISWNSGSI | ANGDSNYYYGMDV | SSNIGSNY | RNN | AAWDDSLSGYL |
| 079 | [SEQ ID | [SEQ ID | [SEQ ID NO: 494] | [SEQ ID | [SEQ ID | [SEQ ID NO: 495] |
| | NO: 403] | NO: 404] | | NO: 490] | NO: 349] | |
| ET200- | GFTFDDYA | ISGDGGST | AKDRAAAGYYYYGMDV | SSDIGGYNY | DVS | ISYTRTWNPYV |
| 081 | [SEQ ID | [SEQ ID | [SEQ ID NO: 497] | [SEQ ID | [SEQ ID | [SEQ ID NO: 499] |
| | NO: 403] | NO: 496] | | NO: 498] | NO: 344] | |
| ET200- | GFTFNDYA | ISWSGNNI | AKDSIRYGITWGGFDY | KLGEKY | QDT | QAWDRGVV |
| 097 | [SEQ ID | [SEQ ID | [SEQ ID NO: 502] | [SEQ ID | [SEQ ID | [SEQ ID NO: 505] |
| | NO: 500] | NO: 501] | | NO: 503] | NO: 504] | |
| ET200- | GFTFDDYA | INWDGGST | AKGMGLRAFDY | SNNVGNLG | RNN | SAWDSSLSA |
| 098 | [SEQ ID | [SEQ ID | [SEQ ID NO: 507] | [SEQ ID | [SEQ ID | [SEQ ID NO: 509] |
| | NO: 403] | NO: 506] | | NO: 508] | NO: 349] | |
| ET200- | GYTFSWYA | INAGNGNT | ARPDNYGSGGDVFDI | SSNIGSNT | SND | ASWDDSLNGRYV |
| 099 | [SEQ ID | [SEQ ID | [SEQ ID NO: 512] | [SEQ ID | [SEQ ID | [SEQ ID NO: 514] |
| | NO: 510] | NO: 511] | | NO: 312] | NO: 513] | |
| ET200- | GFTFSSYE | ISSSGSTI | ARWDYGMDV | SGSIASNF | EDN | QSYDTSNVV |
| 100 | [SEQ ID | [SEQ ID | [SEQ ID NO: 517] | [SEQ ID | [SEQ ID | [SEQ ID NO: 519] |
| | NO: 515] | NO: 516] | | NO: 518] | NO: 319] | |
| ET200- | GYTFTWYA | INAGSGNT | ARPNNYGSGGDVFDI | NSNIGSNY | SSS | ATWDDSLNA |
| 101 | [SEQ ID | [SEQ ID | [SEQ ID NO: 522] | [SEQ ID | [SEQ ID | [SEQ ID NO: 524] |
| | NO: 520] | NO: 521] | | NO: 348] | NO: 523] | |
| ET200- | GYTFTNYA | INGGNGNT | AKPEETAGTIHFDY | SSNIGNNY | DNN | GTWDSSLSAYV |
| 102 | [SEQ ID | [SEQ ID | [SEQ ID NO: 527] | [SEQ ID | [SEQ ID | [SEQ ID NO: 528] |
| | NO: 525] | NO: 526] | | NO: 406] | NO: 398] | |
| ET200- | GGTFSSYA | IIPIFGTA | AGEGYYDSSGYSNGDAFDI | SGSIASNY | EDN | QSYDSTITV |
| 103 | [SEQ ID | [SEQ ID | [SEQ ID NO: 529] | [SEQ ID | [SEQ ID | [SEQ ID NO: 530] |
| | NO: 411] | NO: 412] | | NO: 318] | NO: 319] | |
| ET200- | GFTFSSYE | ISSSGSTI | ARWDYGMDV | SGSIANSNY | EDN | QSYDSSNVV |
| 104 | [SEQ ID | [SEQ ID | [SEQ ID NO: 517] | [SEQ ID | [SEQ ID | [SEQ ID NO: 531] |
| | NO: 515] | NO: 516] | | NO: 318] | NO: 319] | |
| ET200- | GFTFDDYA | ISWNSGSI | AKDRGGGVIVKDAFDI | RLTNKY | EDA | QAWDSSVVV |
| 105 | [SEQ ID | [SEQ ID | [SEQ ID NO: 532] | [SEQ ID | [SEQ ID | [SEQ ID NO: 535] |
| | NO: 403] | NO: 404] | | NO: 533] | NO: 534] | |
| ET200- | GYNFLNYG | ISTYTGNT | ARQQGGGWYDV | VSNIGSGA | SYN | ATWDDSVNG |
| 106 | [SEQ ID | [SEQ ID | [SEQ ID NO: 536] | [SEQ ID ] | [SEQ ID | [SEQ ID NO: 430] |
| | NO: 425] | NO: 426] | | NO: 428 | NO: 429] | |
| ET200- | GYTFTSYT | ISTYNGLT | VREGSPDYGDFASFDY | NFNVGNND | DNN | GTWDSSLNTGGV |
| 107 | [SEQ ID | [SEQ ID | [SEQ ID NO: 539] | [SEQ ID | [SEQ ID | [SEQ ID NO: 541] |
| | NO: 537] | NO: 538] | | NO: 540] | NO: 398] | |
| ET200- | GYTFTSYT | ISTYNGLT | VREGSPDYGDFASFDY | SSNIGNNY | DNN | GTWDTSLSGFYV |
| 108 | [SEQ ID | [SEQ ID | [SEQ ID NO: 539] | [SEQ ID | [SEQ ID | [SEQ ID NO: 542] |
| | NO: 537] | NO: 538] | | NO: 406] | NO: 398] | |
| ET200- | GGTFSSYA | IIPIFGTA | ARDPAYGDYEYDAFDI | TSNIGSNT | NNN | ATWDDSLSGVV |
| 109 | [SEQ ID | [SEQ ID | [SEQ ID NO: 543] | [SEQ ID | [SEQ ID | [SEQ ID NO: 545] |
| | NO: 411] | NO: 412] | | NO: 544] | NO: 448] | |
| ET200- | GGTFSSYA | IIPIFGTA | ARGAGFDAFDI | SSNIGTNG | TND | AVWDHSLNGPV |
| 110 | [SEQ ID | [SEQ ID | [SEQ ID NO: 546] | [SEQ ID | [SEQ ID | [SEQ ID NO: 549] |
| | NO: 411] | NO: 412] | | NO: 547] | NO: 548] | |
| ET200- | GGSFSGYY | INHSGST | AREGLDAFDI | SSNIGSNT | SNN | AAWDDSLNGYV |
| 111 | [SEQ ID | [SEQ ID | [SEQ ID NO: 550] | [SEQ ID | [SEQ ID | [SEQ ID NO: 314] |
| | NO: 309] | NO: 310] | | NO: 312] | NO: 313] | |
| ET200- | GGSFSGYY | INHSGST | AREGLDAFDI | SSNIGSNT | SND | AAWDDSLNGYV |
| 112 | [SEQ ID | [SEQ ID | [SEQ ID NO: 550] | [SEQ ID | [SEQ ID | [SEQ ID NO: 314] |
| | NO: 309] | NO: 310] | | NO: 312] | NO: 513] | |
| ET200- | GYSFTSYT | VSTYNGLR | VREGSPDYGDFAAFDY | SSNIGNNY | DNN | GTWDSSLSAAYV |
| 113 | [SEQ ID | [SEQ ID | [SEQ ID NO: 553] | [SEQ ID | [SEQ ID | [SEQ ID NO: 554] |
| | NO: 551] | NO: 552] | | NO: 406] | NO: 398] | |
| ET200- | GGSFSGYY | INHSGST | ARDGGGYFDY | RSNIGTNI | GS | AAWDDSLNGPA |
| 114 | [SEQ ID | [SEQ ID | [SEQ ID NO: 555] | [SEQ ID | [SEQ ID | [SEQ ID NO: 558] |
| | NO: 309] | NO: 310] | | NO: 556] | NO: 557] | |
| ET200- | GYTFTSYG | INPGSGET | ATGLIRGASDAFNI | SSNGIARYD | ANY | QSYDSSVSAWV |
| 115 | [SEQ ID | [SEQ ID | [SEQ ID NO: 561] | [SEQ ID | [SEQ ID | [SEQ ID NO: 564] |
| | NO: 559] | NO: 560] | | NO: 562] | NO: 563] | |
| ET200- | GFTFSSYS | TYYRSKWYN | ARERSGWKGFDY | KLGDKF | QDT | QTWASGIVV |
| 116 | [SEQ ID | [SEQ ID | [SEQ ID NO: 567] | [SEQ ID | [SEQ ID | [SEQ ID NO: 569] |
| | NO: 565] | NO: 566] | | NO: 568] | NO: 504] | |
| ET200- | GGSFSGYY | ISGSGGST | AKWGPFQDAFDI | QSLLERNAYNY | LGS | MQALQAPFT |
| 117 | [SEQ ID | [SEQ ID | [SEQ ID NO: 570] | [SEQ ID | [SEQ ID | [SEQ ID NO: 573] |
| | NO: 372] | NO: 475] | | NO: 571] | NO: 572] | |
| ET200- | GFTFDDYA | ISWNSGSI | AKARWTAVASDHHFDY | SSDVGGYNY | EVS | SSYTSSSTPYV |
| 118 | [SEQ ID | [SEQ ID | [SEQ ID NO: 574] | [SEQ ID | [SEQ ID | [SEQ ID NO: 576] |
| | NO: 403] | NO: 404] | | NO: 343] | NO: 575] | |
| ET200- | GGTFSSYA | IIPIFGTA | ARDWDYMDV | SSNIGSNT | SNN | AAWDDSLNGYV |
| 119 | [SEQ ID | [SEQ ID | [SEQ ID NO: 577] | [SEQ ID | [SEQ ID | [SEQ ID NO: 314] |
| | NO: 411] | NO: 412] | | NO: 312] | NO: 313] | |
| ET200- | GYTFTSYG | ISAYNGNT | ARDLSRGANPHYYYYYGMDV | SSNIGSNT | SNN | AAWDDSLNGYV |
| 120 | [SEQ ID | [SEQ ID | [SEQ ID NO: 578] | [SEQ ID | [SEQ ID | [SEQ ID NO: 314] |
| | NO: 346] | NO: 327] | | NO: 312] | NO: 313] | |
| ET200- | GYTLTELS | FDPEDGET | ATESNLSRHYYYYGMDV | RSNIGAGYD | GNS | QSYDNTVRESPYV |
| 121 | [SEQ ID | [SEQ ID | [SEQ ID NO: 579] | [SEQ ID | [SEQ ID | [SEQ ID NO: 581] |
| | NO: 436] | NO: 388] | | NO: 580] | NO: 438] | |
| ET200- | GYTFTGYY | INPNSGGT | ARDYGYYGSGSYSSGPLYYYYGMDV | SSNIGSNS | SNN | AAWDDSLNGYV |
| 122 | [SEQ ID | [SEQ ID | [SEQ ID NO: 584] | [SEQ ID | [SEQ ID | [SEQ ID NO: 314] |
| | NO: 582] | NO: 583] | | NO: 585] | NO: 313] | |
| ET200- | GYTFTSYG | ISAYNGNT | ARDLSRGANPHYYYYYGMDV | SSNIGSNT | NND | AAWDDSLNGYV |
| 123 | [SEQ ID | [SEQ ID | [SEQ ID NO: 578] | [SEQ ID | [SEQ ID | [SEQ ID NO: 314] |
| | NO: 346] | NO: 327] | | NO: 312] | NO: 586] | |
| ET200- | GFTFDDYA | ISWNSGSI | AKDITYGSGSYGAFDI | DIGSKS | DDS | QVWDSSSDHYV |
| 124 | [SEQ ID | [SEQ ID | [SEQ ID NO: 587] | [SEQ ID | [SEQ ID | [SEQ ID NO: 375] |
| | NO: 403] | NO: 404] | | NO: 588] | NO: 685] | |
| ET200- | GGTFSSNS | IFPILGIT | ARGNYQWYDAFDI | SGSIASNY | EDN | QSYDSTSVL |
| 125 | [SEQ ID | [SEQ ID | [SEQ ID NO: 591] | [SEQ ID | [SEQ ID | [SEQ ID NO: 592] |
| | NO: 589] | NO: 590] | | NO: 318] | NO: 319] | |

TABLE 230

| CDR | CDR SEQUENCE | SEQ ID NO |
|---|---|---|
| V_{H}CDR1 | IFGLH | SEQ ID NO: 923 |
| V_{H}CDR2 | YISGDSNTIYYADTVKG | SEQ ID NO: 924 |
| V_{H}CDR3 | NSYYALDY | SEQ ID NO: 925 |
| V_{L}CDR1 | RASSSVSSSYLH | SEQ ID NO: 926 |
| V_{L}CDR2 | STSNLAS | SEQ ID NO: 927 |
| V_{L}CDR3 | QQYSGYPWT | SEQ ID NO: 928 |
| V_{H}CDR1 | SFGMH | SEQ ID NO: 929 |
| V_{L}CDR2 | YISSGSNNIYFADTVKG | SEQ ID NO: 930 |
| V_{L}CDR3 | SEYYGSSHMDY | SEQ ID NO: 931 |
| V_{L}CDR1 | KASQNVGTNVA | SEQ ID NO: 932 |
| V_{L}CDR2 | SATYRNS | SEQ ID NO: 933 |
| V_{L}CDR3 | QQYNRYPYT | SEQ ID NO: 934 |

### EXAMPLES

[0422] The practice of the present invention employs, unless otherwise indicated, conventional techniques of molecular biology (including recombinant techniques), microbiology, cell biology, biochemistry and immunology, which are well within the purview of the skilled artisan. Such techniques are explained fully in the literature, such as, “Molecular Cloning: A Laboratory Manual”, second edition (Sambrook, 1989); “Oligonucleotide Synthesis” (Gait, 1984); “Animal Cell Culture” (Freshney, 1987); “Methods in Enzymology” “Handbook of Experimental Immunology” (Weir, 1996); “Gene Transfer Vectors for Mammalian Cells” (Miller and Calos, 1987); “Current Protocols in Molecular Biology” (Ausubel, 1987); “PCR: The Polymerase Chain Reaction”, (Mullis, 1994); “Current Protocols in Immunology” (Coligan, 1991). These techniques are applicable to the production of the polynucleotides and polypeptides of the invention, and, as such, may be considered in making and practicing the invention. Particularly useful techniques for particular embodiments will be discussed in the sections that follow.

[0423] The following examples are put forth so as to provide those of ordinary skill in the art with a complete disclosure and description of how to make and use the assay, screening, and therapeutic methods of the invention, and are not intended to limit the scope of what the inventors regard as their invention.

### Example 1—FcRL5 Expression in various tissues

[0424] The expression of human FcRL5 was assessed and evaluated in various tissues. As shown in FIGS. 1A-1D, human FcRL5 was highly expressed in lymphoma and multiple myeloma, but not in other tissues. Top panel of FIGS. 1A-1D shows differential expression of human FcRL5 in tumor cell lines from the Cancer Cell Line Encyclopedia (CCLE). The bottom panel of FIGS. 1A-1D shows differential expression of human FcRL5 in normal tissue from BioGPS. As shown in FIGS. 1A-1D, human FcRL5 expression is limited to MM and lymphoma compared to other malignant cells. Normal expression appeared limited to B-cells and plasma cells. Potential FcRL5 targeted CAR T cell eradication of these normal cell types may not have significant adverse effects based on inventors' patient experience with CD19 targeted CAR T cells. Any lack of physiologic antibody production can be addressed with intravenous immunoglobulin treatment.

### Example 2—Selection of ScFv specific for FcRL5 using a fully human phage display library

[0425] Phage display selection against FcRL5 was conducted using a cell panning strategy with 31 human scFv naïve and semi-synthetic phage sub-libraries. FcRL5 overexpressing 3T3 cells were used in positive panning, FcRL1, 2, 3, 4 and 6 overexpressing 3T3 cells (5 cell lines in total) were used in negative panning (FIG. 2). Bound clones were then eluted and used to infect E. Coli XL1-Blue. The scFv phage clones expressed in the bacteria were purified as previously described (Yasmina, et al. 20 Probing the binding mechanism and affinity of tanezumab, a recombinant humanized anti-NGF monoclonal antibody, using a repertoire of biosensors. Protein Science 2008, 17(8):1326-1335; Roberts, et al. Vaccination with CD20 peptides induces a biologically active, specific immune response in mice. Blood 2002, 99(10):3748-3755). Panning was performed for about 3 to about 4 cycles to enrich scFv phage clones that bind to FcRL5 specifically. Positive clones were determined by an ELISA method against His-tag FcRL5.

[0426] Positive clones were further tested for their binding to FcRL5 on live cell surfaces by flow cytometry, using FcRL5-overexpressing cell lines, 3T3 and Raji. The cells were then washed, and the staining was performed using the following steps: the cells can be first stained with purified scFv phage clones, and followed by staining with a mouse anti-M13 mAb, and finally the horse anti-mouse Ig's conjugate to PE. Each step of the staining was completed between 30-60 minutes on ice and the cells were washed twice between each step of the staining.

[0427] 76 unique clones that were specific for FcRL5 were identified and confirmed by screening (see Tables 1-229 and FIG. 2).

### Example 3—Selection of ScFv specific for domain 9 of FcRL5

[0428] FcRL5 contains 9 extracellular immunoglobulin-like domains (domains 1-9) and can be present within a cell in a soluble isoform, a glycosyl-phosphotidyl inositol (GPI)-anchor type isoform and a transmembrane-type isoform (FIG. 3A). As shown in FIG. 2A, the transmembrane-type isoform of FcRL5 has domain 9; whereas, the soluble isoform and the GPI-anchor type isoform do not.

[0429] To test if the scFvs were specific to domain 9 of FcRL5, the 76 clones were further screened on 3T3 cells overexpressing an vector encoding FcRL5 with a domain 9 deletion (FcRL5Δdom9) and further screened on Raji cells overexpressing full-length FcRL5 (FIG. 4B-D). Some clones showed either reduced or diminished binding towards FcRL5-domain 9 deletion-overexpressing 3T3 cells compared to binding towards FcRL5-overexpressing 3T3 cells. FIGS. 4, 5, 6A-6B, 7 and 8 shows the specificity of ET200-39, ET200-104, ET200-105, ET200-109 and ET200-117 for domain 9 of FcRL5, respectively.

### Example 4—Construct of murine FcRL5-specific CARs

[0430] For generation of a scFv targeting human FcRL5, two commercially available mouse hybridomas binding different extracellular epitopes on human FcRL5 (Franco (2013); Ise et al. (2005); Ise et al. (2006)) were obtained. From these hybridomas, two scFvs targeting human FcRL5 were obtained. One scFv was generated by synthesizing the heavy and light chain variable region of murine anti-human FcRL5 antibody F56 as described in Ise et al. (2005) with a G4S linker having the amino acid sequence of SEQ ID NO:897. A second scFv was generated by synthesizing the heavy and light chain variable region of murine anti-human FcRL5 antibody F119 as described in Ise et al. (2005) with a G4S linker having the amino acid sequence of SEQ ID NO:897. Two FcRL5 CARs were generated: F56 FcRL5-28z CAR and F119 FcRL5-28z CAR. F56 FcRL5-28z CAR and F119 FcRL5-28z CAR have similar structure, e.g., each has a transmembrance domain comprising a CD28 polypeptide, and an intracellular domain comprising a CD3 polypeptide and a co-stimulatory signaling region that comprises a CD28 polypeptide, as shown in FIG. 9A. F56 FcRL5-28z CAR comprises an scFv derived from antibody F56, and F119 FcRL5-28z CAR comprises an scFv derived from antibody F119. Each of F56 FcRL5-28z CAR and F119 FcRL5-28z CAR were cloned into a retroviral vector 293galv9. Human T cells (unselected (CD4 and CD8) human T cells from a healthy donor) were transduced with each of F56 FcRL5-28z CAR and F119 FcRL5-28z CAR such that the T cells expressed F56 FcRL5-28z CAR or F119 FcRL5-28z CAR.

### Example 5—Construct of human FcRL5-specific CARs

[0431] This Example discloses the generation of CARs targeting human FcRL5 using the fully human scFvs described herein. ET200-31 scFv, ET200-39 scFv, ET200-69 scFv, ET200-104 scFv, ET200-105 scFv, ET200-109 scFv and ET200-117 scFvs were used to generate second generation FcRL5-targeted CARs designated as 31 FcRL5 BBz CAR, 39 FcRL5 BBz CAR, 69 FcRL5 BBz CAR, 10⁴ FcRL5 BBz CAR, 105 FcRL5 BBz CAR, 109 FcRL5 BBz CAR and 117 FcRL5 BBz CAR with either a 4-1BB co-stimulatory domain and a CD3 polypeptide (see FIGS. 9B-16). The FcRL5-targeted 4-1BB containing CARs have a similar structure, e.g., each has a CD8a polypeptide transmembrane domain, and an intracellular domain comprising co-stimulatory signaling region consisting of a CD3 polypeptide and a 4-1BB polypeptide, as shown in FIG. 9B. Each of these FcRL5-targeted CARs were cloned into an SFG retroviral vector, as an example the 4-1BB containing CAR vectors are shown in FIGS. 10-16. These viral vectors are then transduced into HEK 293galv9 viral packaging cells in order to generate a stable packaging line for generation of CAR+ T cells.

### Example 6—Expression of human FcRL5-specific CARs in T cells

[0432] Human primary T cells were transduced using supernatant from retroviral galv9 HEK 293 packaging cells to express a FcRL5-targeted 4-1BBz CAR (generated using the anti-FcRL5 ET200-10⁴ scFv). The cell surface expression of the FcRL5-targeted CAR was determined by binding to recombinant human FcRL5 which was modified to contain a His tag followed by the binding of a PE conjugated anti-HIS tag secondary antibody, as shown in FIG. 17. Cell surface detection was validated by flow cytometry. As shown in FIG. 17, the FcRL5-targeted CAR was expressed on the transduced T cells.

### Example 7—Cytotoxicity of human FcRL5-specific CARs

[0433] The cytotoxic effects of the FcRL5-targeted 4-1BB CAR T cells were analyzed using Raji (a Burkett's lymphoma cell line) cells transduced to express luciferase and FcRL5 antigen or the control 30 GPRC5D (an irrelevant antigen). T cells expressing the 4-1BB CAR generated using the anti-FcRL5 ET200-69 scFv were used in these experiments (referred to herein as “αFcRL5-69 BBz”). The number of live cells is determined after 36h co-culture by bioluminescent imaging (BLI). As shown in FIG. 18, FcRL5-targeted CAR T cells specifically lysed Raji cells transduced to express luciferase and FcRL5 antigen (FIG. 18A) but not control GPRC5D expressing Raji cells which are lysed by GPRC5D-targeted CAR T cells (FIG. 18B).

### Example 8—Cytokine secretion of human FcRL5-specific CARs

[0434] This Example describes the cytokine secretion of FcRL5-targeted CAR T cells. T cells expressing the 4-1BB CAR generated using the anti-FcRL5 ET200-69 scFv were used in these experiments. IL-2, INFγ, and TNFα secretion after 24h co-culture of FcRL5 targeted CAR T cells on a monolayer of 3T3 cells transduced with either FcRL5 or CD19 was assessed by Luminex multiplex analysis. As shown in FIG. 19, signaling through the CAR of FcRL5-targeted CAR T cells induced cytokine secretion consistent with T cell activation.

### Example 9—Proliferation of human FcRL5-specific CARs

[0435] This Example describes the proliferation of FcRL5-targeted CAR T cells upon antigen 15 stimulation. T cells expressing the 4-1BB CAR generated using the anti-FcRL5 ET200-69 scFv was used in these experiments. 500,000 FcRL5- or CD19-targeted CAR+ T cells/ml were placed on a monolayer of 3T3 cells that have been transduced with either FcRL5 or CD19 (3T3-FcRL; 3T3-CD19). After 4 days, CAR+ T cells were stained and counted by flow cytometry with the inclusion of a known concentration of counting microbeads. As shown in FIG. 20, antigen stimulation of FcRL5-targeted CAR T cells induced proliferation. FcRL5-targeted CAR T cells co-cultured with 3T3-FcRL5 cells expanded to be 2.9 times greater then FcRL5-targeted CAR T cells co-cultured with 3T3-CD19 cells, while control CD19 targeted CAR T cells co-cultured with 3T3-CD19 cells similarly expanded to be 2.5 fold greater then CD19 targeted CAR T cells co-cultured with 3T3-FcRL5 cells (FIG. 20).

### Example 10—Epitope mapping of human anti-FcRL5 antibodies

[0436] Two anti-FcRL5 bispecific antibodies, ET200-104 and ET200-117, were analyzed by Pepscan to determine epitope specificity. See Table 239. The target protein is human FcRL5 comprising amino acids 1-851 of SEQ ID NO: 899.

TABLE 239

| Name | Origin | Concentration | Location |
|---|---|---|---|
| ET200-104 | human | 2.0 mg/ml | +4° C./22 |
| bispecific scFV | | | |
| ET200-117 | human | 1.6 mg/ml | +4° C./22 |
| bispecific scFV | | | |

### Methods

[0437] The principles of clips technology. CLIPS technology structurally fixes peptides into defined three-dimensional structures. This results in functional mimics of even the most complex binding sites. CLIPS technology is now routinely used to shape peptide libraries into single, double or triple looped structures as well as sheet- and helix-like folds (FIG. 21).

[0438] Combinatorial clips library screening in detail. CLIPS library screening starts with the conversion of the target protein into a library of up to 10,000 overlapping peptide constructs, using a combinatorial matrix design. On a solid carrier, a matrix of linear peptides is synthesized, which are subsequently shaped into spatially defined CLIPS constructs (FIG. 22). Constructs representing both parts of the discontinuous epitope in the correct conformation bind the antibody with high affinity, which is detected and quantified. Constructs presenting the incomplete epitope bind the antibody with lower affinity, whereas constructs not containing the epitope do not bind at all. Affinity information is used in iterative screens to define the sequence and conformation of epitopes in detail.

[0439] Heat map analysis. A heat map is a graphical representation of data where the values taken by a variable in a two-dimensional map are represented as colors. For double-looped CLIPS peptides, such a two-dimensional map can be derived from the independent sequences of the first and second loops. For example, the sequences of the 16 CLIPS peptides depicted in FIG. 24 are effectively permutations of 4 unique sub-sequences in loop 1 (colored in blue in FIG. 23) and 4 unique sub-sequences in loop 2 (colored in green in FIG. 23). Thus, the observed ELISA data (colored in red in FIG. 24A) can be plotted in a 4×4 matrix, where each X coordinate corresponds to the sequence of the first loop, and each Y coordinate corresponds to the sequence of the second loop. For instance, the ELISA value observed for CLIPS peptide CLSSERERVEDLFEYECELLTSEPIFHCRQEDC (indicated with an arrow in FIG. 23A) can be found at the third row, third column of FIG. 24B (indicated with an arrow and a red square). To further facilitate the visualization, ELISA values can be replaced with colors from a continuous gradient. In this case, extremely low values are colored in green, extremely high values are colored in red, and average values are colored in black (see FIG. 24C). For the aforementioned example, the average value is 0.71. When this color map is applied to the data matrix depicted in FIG. 24B, a color heat map is obtained (see FIG. 24D, the original data is still indicated for extra clarity).

[0440] Synthesis of peptides. To reconstruct epitopes of the target molecule a library of peptides was synthesized. An amino functionalized polypropylene support was obtained by grafting with a proprietary hydrophilic polymer formulation, followed by reaction with t-butyloxycarbonyl-hexamethylenediamine (BocHMDA) using dicyclohexylcarbodiimide (DCC) with Nhydroxybenzotriazole (HOBt) and subsequent cleavage of the Boc-groups using trifluoroacetic acid (TFA). Standard Fmoc-peptide synthesis was used to synthesize peptides on the amino-functionalized solid support by custom modified JANUS liquid handling stations (Perkin Elmer). Synthesis of structural mimics was done using Pepscan's proprietary Chemically Linked Peptides on Scaffolds (CLIPS) technology. CLIPS technology allows to structure peptides into single loops, doubleloops, triple loops, sheet-like folds, helix-like folds and combinations thereof. CLIPS templates are coupled to cysteine residues. The side-chains of multiple cysteines in the peptides were coupled to one or two CLIPS templates. For example, a 0.5 mM solution of the P2 CLIPS (2,6-bis(bromomethyl)pyridine) was dissolved in ammonium bicarbonate (20 mM, pH 7.8)/acetonitrile (1:3(v/v)). This solution was added onto the peptide arrays. The CLIPS template bound to side-chains of two cysteines as present in the solid-phase bound peptides of the peptide-arrays (455 wells plate with 3 l wells). The peptide arrays were gently shaken in the solution for 30 to 60 minutes while completely covered in solution. Finally, the peptide arrays were washed extensively with excess of H₂O and sonicated in disrupt-buffer containing 1% SDS/0.1% beta-mercaptoethanol in PBS (pH 7.2) at 70° C. for 30 minutes, followed by sonication in H₂O for another 45 minutes. The T3 CLIPS carrying peptides were made in a similar way but now with three cysteines.

[0441] ELISA Screening. The binding of antibody to each of the synthesized peptides was tested in a PEPSCAN-based ELISA. The peptide arrays were incubated with primary antibody solution (overnight at 4° C.). After washing, the peptide arrays were incubated with a 1/1000 dilution of an appropriate antibody peroxidase conjugate (SBA) for one hour at 25° C. After washing, the peroxidase substrate 2,2′-azino-di-3-ethylbenzthiazoline sulfonate (ABTS) and 2 μl/ml of 3 percent H₂O₂ were added. After one hour, the color development was measured. The color development was quantified with a charge coupled device (CCD) -camera and an image processing system.

[0442] Data processing. The values obtained from the CCD camera ranged from 0 to 3000 mAU, similar to a standard 96-well plate ELISA-reader. The results were quantified and stored into the Peplab database. Occasionally a well contained an air-bubble resulting in a false-positive value, the cards were manually inspected and any values caused by an air-bubble were scored as 0.

[0443] Synthesis quality control. To verify the quality of the synthesized peptides, a separate set of positive and negative control peptides was synthesized in parallel. These were screened with antibody 57.9 (ref. Posthumus et al., J. Virology, 1990, 64:3304-3309).

### Results

[0444] Screening. Antibody binding depends on a combination of factors, including concentration of the antibody and the amounts and nature of competing proteins in the ELISA buffer. Also, the pre-coat conditions (the specific treatment of the peptide arrays prior to incubation with the experimental sample) affected binding. These details are summed up in Table 240. For the Pepscan Buffer and Preconditioning (SQ), the numbers indicate the relative amount of competing protein (a combination of horse serum and ovalbumin).

TABLE 240
Screening conditions

| Label | Dilution | Sample Buffer | Pre-conditioning |
|---|---|---|---|
| ET200-104 | 8 μg/ml | PBS-Tween | PBS-Tween |
| ET200-117 | 3 μg/ml | PBS-Tween | 0.1% SQ |

[0445] Antibodies ET200-104 and ET200-117 were coated at 1 g/ml on a Nunc Maxisorp plate for ELISA and detected with Goat Anti-Human Ig-HRP (Southern Biotech; #2010/05), the same conjugate that is used in minicard screenings. For ET200-104 and ET200-117 signal >1 OD was obtained for some dilutions of the secondary Ab, indicating that the secondary antibody is well suited for detection of these mAbs.

[0446] Herceptin was used as an internal negative control at high concentration in the absence of blocking buffer. Herceptin bound peptides with common sequences LRGSPLILYRF, LRGSSPILYWF and APRGSPPILYW (FIGS. 25A-25D). Peptides containing aforementioned sequences were excluded from epitope candidates for test samples.

[0447] When tested under low stringency conditions and at a high concentration antibody ET200-104 binds multiple peptide motifs in all sets (FIGS. 26A-26D). The majority of peptides bound were suspected to be the result of non-specific hydrophic interactions based on the results obtained for Herceptin (internal negative control). However, binding of peptides containing motif₆₅₇SRPILTFRAPR₆₆₇ was proposed to be specific, and was uniquely attributed to sample ET200-104.

[0448] When tested under low stringency conditions antibody ET200-117 resulted in weak binding of multiple peptide motifs on all sets. Cumulative data analysis of data obtained for all sets suggests that the antibody uniquely recognizes a region containing peptide stretch ₈₂₉RSETVTLYITGL₈₄₀ in domain 9 of Fc receptor-like protein 5 distinct from the Herceptin internal negative control and ET200-104. Again the majority of other peptides bound were suspected to be the result of unspecific hydrophic interactions that shared as the same binding pattern was recorded under low stringency conditions for antibody ET200-104.

### CONCLUSIONS

[0449] Cumulative data analysis of results collected for ET200-104, and ET200-117 vs. Herceptin suggest that antibody ET200-104 targets residues ₆₅₇SRPILTFRAPR₆₆₇ within domain 8 of Fc receptor-like protein 5 and antibody ET200-117 targets residues ₈₂₉RSETVTLYITGL₈₄₀ within domain 9. Additionally, for both samples multiple signals were recorded with peptides non-specifically bound by Herceptin. The epitope candidate identified for ET200-104 was visualized using a publically available 3D model of Fc receptor-like protein 5 (FIG. 27). The epitope candidate for ET200-117 lies within the non-modeled part of the target and therefore cannot be visualized.

### REFERENCES

[0450] 1. Franco, A., et al. Human Fc receptor-like 5 binds intact IgG via mechanisms distinct from those of Fc receptors. Journal of immunology 190, 5739-5746 (2013).
[0451] 2. Dement-Brown, J., et al. Fc receptor-like 5 promotes B cell proliferation and drives the development of cells displaying switched isotypes. Journal of leukocyte biology 91, 59-67 (2012).
[0452] 3. Ise, T., et al. Elevation of soluble CD307 (IRTA2/FcRH5) protein in the blood and expression on malignant cells of patients with multiple myeloma, chronic lymphocytic leukemia, and mantle cell lymphoma. Leukemia 21, 169-174 (2007).
[0453] 4. Elkins, K., et al. FcRL5 as a target of antibody-drug conjugates for the treatment of multiple myeloma. Molecular cancer therapeutics 11, 2222-2232 (2012).
[0454] 5. Hatzivassiliou, G., et al. IRTA1 and IRTA2, novel immunoglobulin superfamily receptors expressed in B cells and involved in chromosome 1q21 abnormalities in B cell malignancy. Immunity 14, 277-289 (2001).
[0455] 6. An, G., et al. Chromosome 1q21 gains confer inferior outcomes in multiple myeloma treated with bortezomib but copy number variation and percentage of plasma cells involved have no additional prognostic value. Haematologica 99, 353-359 (2014).
[0456] 7. Ise, T., et al. Immunoglobulin superfamily receptor translocation associated 2 protein on lymphoma cell lines and hairy cell leukemia cells detected by novel monoclonal antibodies. Clinical cancer research: an official journal of the American Association for Cancer Research 11, 87-96 (2005).
[0457] 8. Ise, T., Kreitman, R.J., Pastan, I. & Nagata, S. Sandwich ELISAs for soluble immunoglobulin superfamily receptor translocation-associated 2 (IRTA2)/FcRH5 (CD307) proteins in human sera. Clinical chemistry and laboratory medicine: CCLM/FESCC 44, 594-602 (2006).
[0458] 9. Brentjens, R. J., et al. Safety and persistence of adoptively transferred autologous CD19-targeted T cells in patients with relapsed or chemotherapy refractory B-cell leukemias. Blood 118, 4817-4828 (2011).
[0459] 10. Brentjens, R. J., et al. Eradication of systemic B-cell tumors by genetically targeted human T lymphocytes co-stimulated by CD80 and interleukin-15. Nature medicine 9, 279-286 (2003).
[0460] 11. Brentjens, R. J., et al. CD19-Targeted T Cells Rapidly Induce Molecular Remissions in Adults with Chemotherapy-Refractory Acute Lymphoblastic Leukemia. Science translational medicine 5, 177ra138 (2013).
[0461] 12. Davila, M. L., et al. Efficacy and Toxicity Management of 19-28z CAR T Cell Therapy in B Cell Acute Lymphoblastic Leukemia. Science translational medicine 6, 224ra225 (2014).
[0462] 13. Siegel, R., Naishadham, D. & Jemal, A. Cancer statistics, 2013. CA: a cancer journal for clinicians 63, 11-30 (2013).
[0463] 14. Boyd, K. D., et al. The clinical impact and molecular biology of del(17p) in multiple myeloma treated with conventional or thalidomide-based therapy. Genes, chromosomes & cancer 50, 765-774 (2011).
[0464] 15. Shaughnessy, J.D., Jr., et al. A validated gene expression model of high-risk multiple myeloma is defined by deregulated expression of genes mapping to chromosome 1. Blood 109, 2276-2284 (2007).
[0465] 16. Gahrton, G., et al. Allogeneic bone marrow transplantation in multiple myeloma. European Group for Bone Marrow Transplantation. The New England journal of medicine 325, 1267-1273 (1991).
[0466] 17. Pegram, H. J., et al. Tumor-targeted T cells modified to secrete IL-12 eradicate systemic tumors without need for prior conditioning. Blood 119, 4133-4141 (2012).
[0467] 18. Sabrina Bertilaccio, M. T., et al. Low-Dose Lenalidomide Improves CAR-Based Immunotherapy In CLL By Reverting T-Cell Defects In Vivo. Blood 122, 4171 (2013).
[0468] 19. Bataille, R., et al. The phenotype of normal, reactive and malignant plasma cells. Identification of “many and multiple myelomas” and of new targets for myeloma therapy. Haematologica 91, 1234-1240 (2006).
[0469] 20. Morgan, R. A., et al. Case report of a serious adverse event following the administration of T cells transduced with a chimeric antigen receptor recognizing ERBB2. Molecular therapy: the journal of the American Society of Gene Therapy 18, 843-851 (2010).
[0470] 21. Brentjens, R. J., et al. Safety and persistence of adoptively transferred autologous CD19-targeted T cells in patients with relapsed or chemotherapy refractory B-cell leukemias. Blood 118, 4817-4828 (2011).
[0471] 22. Brentjens, R. J., et al. CD19-targeted T cells rapidly induce molecular remissions in adults with chemotherapy-refractory acute lymphoblastic leukemia. Science translational medicine 5, 177ra138 (2013).
[0472] 23. Hunder, N. N., et al. Treatment of metastatic melanoma with autologous CD4⁺ T cells against NY-ESO-1. N.Engl.J.Med. 358, 2698-2703 (2008).
[0473] 24. Rosenberg, S. A., Restifo, N. P., Yang, J. C., Morgan, R.A. & Dudley, M. E. Adoptive cell transfer: a clinical path to effective cancer immunotherapy. Nat.Rev.Cancer 8, 299-308 (2008).
[0474] 25. Dudley, M.E., et al. Adoptive cell therapy for patients with metastatic melanoma: evaluation of intensive myeloablative chemoradiation preparative regimens. J Clin Oncol 26, 5233-5239 (2008).
[0475] 26. Brentjens, R. J., et al. Genetically targeted T cells eradicate systemic acute lymphoblastic leukemia xenografts. Clin.Cancer Res. 13, 5426-5435 (2007).
[0476] 27. Gade, T. P., et al. Targeted elimination of prostate cancer by genetically directed human T lymphocytes. Cancer Res. 65, 9080-9088 (2005).
[0477] 28. Maher, J., Brentjens, R. J., Gunset, G., Riviere, I. & Sadelain, M. Human T-lymphocyte cytotoxicity and proliferation directed by a single chimeric TCRzeta/CD28 receptor. Nat.Biotechnol. 25 20, 70-75 (2002).
[0478] 29. Kershaw, M. H., et al. Gene-engineered T cells as a superior adjuvant therapy for metastatic cancer. J Immunol 173, 2143-2150 (2004).
[0479] 30. Sadelain, M., Brentjens, R. & Riviere, I. The promise and potential pitfalls of chimeric antigen receptors. Curr Opin Immunol (2009).
[0480] 31. Hollyman, D., et al. Manufacturing validation of biologically functional T cells targeted to CD19 antigen for autologous adoptive cell therapy. JImmunother 32, 169-180 (2009).
[0481] 32. Sadelain, M., Brentjens, R. & Riviere, I. The basic principles of chimeric antigen receptor design. Cancer discovery 3, 388-398 (2013).
[0482] 33. Riviere, I., Sadelain, M. & Brentjens, R.J. Novel strategies for cancer therapy: the potential of genetically modified T lymphocytes. Curr Hematol Rep 3, 290-297 (2004).
[0483] 34. Stephan, M. T., et al. T cell-encoded CD80 and 4-1BBL induce auto- and transco-stimulation, resulting in potent tumor rejection. Nat.Med. 13, 1440-1449 (2007).
[0484] 35. Krause, A., et al. Antigen-dependent CD28 signaling selectively enhances survival and proliferation in genetically modified activated human primary T lymphocytes. J Exp Med 188, 619-626 (1998).
[0485] 36. Gong, M. C., et al. Cancer patient T cells genetically targeted to prostate-specific membrane antigen specifically lyse prostate cancer cells and release cytokines in response to prostate-specific membrane antigen. Neoplasia. 1, 123-127 (1999).
[0486] 37. Lyddane, C., et al. Cutting Edge: CD28 controls dominant regulatory T cell activity during active immunization. J.Immunol. 176, 3306-3310 (2006).

[0487] From the foregoing description, it will be apparent that variations and modifications may be made to the invention described herein to adopt it to various usages and conditions. Such embodiments are also within the scope of the following claims.

[0488] All patents and publications and sequences referred to by accession or reference number mentioned in this specification are herein incorporated by reference to the same extent as if each independent patent and publication and sequence was specifically and individually indicated to be incorporated by reference.

The application's sequence listing, which the Patent Office published only in electronic form, follows.

SEQUENCE LISTING (1149 sequences)

SEQ ID NO: 1 - DNA, 333 bp, synthetic construct
  misc_feature 1..333: note = Description of Artificial Sequence: Synthetic polynucleotide
  source 1..333: mol_type = other DNA
cagtctgtgttgacgcagccaccctcagcgtctgggacccccgggcagagggtcaccatctcttgttctggaagcagctccaacatcggaagtaatactgtaaactggtaccagcagctcccaggaacggcccccaaactcctcatctatagtaataatcagcggccctcaggggtccctgaccgattctctggctccaagtctggcacctcagcctccctggccatcagtgggctccagtctgaggatgaggctgattattactgtgcagcatgggatgacagcctgaatggttatgtcttcggaactgggaccaaggtcaccgtcctaggt

SEQ ID NO: 2 - DNA, 351 bp, synthetic construct
  misc_feature 1..351: note = Description of Artificial Sequence: Synthetic polynucleotide
  source 1..351: mol_type = other DNA
caggtgcagctacagcagtggggcgcaggactgttgaagccttcggagaccctgtccctcacctgcgctgtgtatggtgggtccttcagtggttactactggagctggatccgccagcccccagggaaggggctggagtggattggggaaatcaatcatagtggaagcaccaactacaacccgtccctcaagagtcgagtcaccatatcagtagacacgtccaagaaccagttctccctgaagctgagctctgtgaccgccgcggacacggccgtgtattactgtgcgcgcgaaggtccgtacgacggtttcgattcttggggtcaaggtactctggtgaccgtctcctca

SEQ ID NO: 3 - protein, 111 aa, synthetic construct
  REGION 1..111: note = Description of Artificial Sequence: Synthetic polypeptide
QSVLTQPPSASGTPGQRVTISCSGSSSNIGSNTVNWYQQLPGTAPKLLIYSNNQRPSGVPDRFSGSKSGTSASLAISGLQSEDEADYYCAAWDDSLNGYVFGTGTKVTVLG

SEQ ID NO: 4 - protein, 117 aa, synthetic construct
  REGION 1..117: note = Description of Artificial Sequence: Synthetic polypeptide
QVQLQQWGAGLLKPSETLSLTCAVYGGSFSGYYWSWIRQPPGKGLEWIGEINHSGSTNYNPSLKSRVTISVDTSKNQFSLKLSSVTAADTAVYYCAREGPYDGFDSWGQGTLVTVSS

SEQ ID NO: 5 - DNA, 336 bp, synthetic construct
  misc_feature 1..336: note = Description of Artificial Sequence: Synthetic polynucleotide
  source 1..336: mol_type = other DNA
aattttatgctgactcagccccactctgtgtcggagtctccggggaagacggtaaccatctcctgcacccgcagcagtggcagcattgccagcaactatgtgcagtggtaccagcagcgcccgggcagtgcccccaccactgtgatctatgaggataaccaaagaccctctggggtccctgatcggttctctggctccatcgacagctcctccaactctgcctccctcaccatctctggactgaagactgaggacgaggctgactactactgtcagtcttatgatagcagcaattctgtggtattcggcggagggaccaagctgaccgtcctaggt

SEQ ID NO: 6 - DNA, 348 bp, synthetic construct
  misc_feature 1..348: note = Description of Artificial Sequence: Synthetic polynucleotide
  source 1..348: mol_type = other DNA
caggtccagctggtacagtctggcactgaggtgaagaagcctggggcctcagtgagggtcgcctgcaaggcttctggttacccctttaacaaatatgacatcaactgggtgcgacaggcccctggacaagggcttgagtggatgggaggcatcatccctatctttcgtacaacaaactacgcacagaagttccagggcagagtcacgattaccgcggacgaatccacgagcacagcctacatggagctgagcagcctgagatctgaggacacggccgtatattactgtgcgcgcgaatggttctactgggatatctggggtcaaggtactctggtgaccgtctcctca

SEQ ID NO: 7 - protein, 112 aa, synthetic construct
  REGION 1..112: note = Description of Artificial Sequence: Synthetic polypeptide
NFMLTQPHSVSESPGKTVTISCTRSSGSIASNYVQWYQQRPGSAPTTVIYEDNQRPSGVPDRFSGSIDSSSNSASLTISGLKTEDEADYYCQSYDSSNSVVFGGGTKLTVLG

SEQ ID NO: 8 - protein, 116 aa, synthetic construct
  REGION 1..116: note = Description of Artificial Sequence: Synthetic polypeptide
QVQLVQSGTEVKKPGASVRVACKASGYPFNKYDINWVRQAPGQGLEWMGGIIPIFRTTNYAQKFQGRVTITADESTSTAYMELSSLRSEDTAVYYCAREWFYWDIWGQGTLVTVSS

SEQ ID NO: 9 - DNA, 324 bp, synthetic construct
  misc_feature 1..324: note = Description of Artificial Sequence: Synthetic polynucleotide
  source 1..324: mol_type = other DNA
cagtctgtgttgactcagccaccctcagtgtccgtgtccccaggacagacagccagcatctcctgctctggaaataaattggggactaagtatgtttactggtatcagaagaggccaggccagtcccctgtgttggtcatgtatgaagataatcagcggccctcagggatcccggagcggttctctggctccaactctgggaacacagccactctgaccatcagagggacccagactgtggatgaggctgactattactgtcaggcgtgggactccgacactttcgtggtcttcggcggagggaccaaggtcaccgtcctaggt

SEQ ID NO: 10 - DNA, 363 bp, synthetic construct
  misc_feature 1..363: note = Description of Artificial Sequence: Synthetic polynucleotide
  source 1..363: mol_type = other DNA
gaggtgcagctggtggagaccgggggaggcgtggtccagcctgggaggtccctgagactctcctgtgcagcctctggattcaccttcagtagttatggcatgcactgggtccgccaggctccaggcaaggggctggagtgggtggcagttatatcacatgatggaagtaataaatactacgcagactccgtgaagggccgattcaccatctccagagacaattccaaggacacgctgtatctgcaaatgaacagcctgagaggtgaggacacggccgtatattactgtgcgcgctctaaccagtggtctggttacttctctttcgattactggggtcaaggtactctggtgaccgtctcctca

SEQ ID NO: 11 - protein, 108 aa, synthetic construct
  REGION 1..108: note = Description of Artificial Sequence: Synthetic polypeptide
QSVLTQPPSVSVSPGQTASISCSGNKLGTKYVYWYQKRPGQSPVLVMYEDNQRPSGIPERFSGSNSGNTATLTIRGTQTVDEADYYCQAWDSDTFVVFGGGTKVTVLG

SEQ ID NO: 12 - protein, 121 aa, synthetic construct
  REGION 1..121: note = Description of Artificial Sequence: Synthetic polypeptide
EVQLVETGGGVVQPGRSLRLSCAASGFTFSSYGMHWVRQAPGKGLEWVAVISHDGSNKYYADSVKGRFTISRDNSKDTLYLQMNSLRGEDTAVYYCARSNQWSGYFSFDYWGQGTLVTVSS

SEQ ID NO: 13 - DNA, 330 bp, synthetic construct
  misc_feature 1..330: note = Description of Artificial Sequence: Synthetic polynucleotide
  source 1..330: mol_type = other DNA
tcctatgtgctgactcagccaccctcagtgtcagtggccccaggaaagacggccaggattacctgtgggggaaacaacattggaagtaaaagtgtgcactggtaccagcagaagccaggccaggcccctgtggtggtcatccattatgatagcgaccggccctcagggatccctgagcgattctctggctccaactctgggaacacggccaccctgaccatcagcagggtcgaagccggggatgaggccgactattactgtcaggtgtgggatagtagtagtgatcatccttatgtcttcggaactgggaccaaggtcaccgtcctaggt

SEQ ID NO: 14 - DNA, 351 bp, synthetic construct
  misc_feature 1..351: note = Description of Artificial Sequence: Synthetic polynucleotide
  source 1..351: mol_type = other DNA
gaggtgcagctggtgcagtctggagctgaggtgaagaagcctggggcctcagtgaaggtctcctgcaaggcttctggttacacctttaccacctatggtatcagctgggtgcgacaggcccctggacaagggcttgagtggatgggatggatcaacacttacaatggtcacacaaactatgcacagaagctccagggcagagccacaatgaccgcagacacatccacgaacacagcctacatggagctgaggagcctgagatctgacgacactgccgtgtattactgtgcgcgcgttatctacggttctggtgattactggggtcaaggtactctggtgaccgtctcctca

SEQ ID NO: 15 - protein, 110 aa, synthetic construct
  REGION 1..110: note = Description of Artificial Sequence: Synthetic polypeptide
SYVLTQPPSVSVAPGKTARITCGGNNIGSKSVHWYQQKPGQAPVVVIHYDSDRPSGIPERFSGSNSGNTATLTISRVEAGDEADYYCQVWDSSSDHPYVFGTGTKVTVLG

SEQ ID NO: 16 - protein, 117 aa, synthetic construct
  REGION 1..117: note = Description of Artificial Sequence: Synthetic polypeptide
EVQLVQSGAEVKKPGASVKVSCKASGYTFTTYGISWVRQAPGQGLEWMGWINTYNGHTNYAQKLQGRATMTADTSTNTAYMELRSLRSDDTAVYYCARVIYGSGDYWGQGTLVTVSS

SEQ ID NO: 17 - DNA, 327 bp, synthetic construct
  misc_feature 1..327: note = Description of Artificial Sequence: Synthetic polynucleotide
  source 1..327: mol_type = other DNA
tcctatgtgctgactcagccactctcagtgtcagtggccccaggaaagacggccaggattacctgtgggggaaacaacattggaagtaaaactgtgcactggtaccagcagaagccaggccaggcccctgtgctggtcatctattatgatagcgaccggccctcagggatccctgagcgattctctggctccaactctgggaacacggccaccctgaccatcagcagggtcgaagccggggatgaggccgactattactgtcaggtgtgggatagtagtagtgatcatcgggtgttcggcggagggaccaagctgaccgtcctaggt

SEQ ID NO: 18 - DNA, 348 bp, synthetic construct
  misc_feature 1..348: note = Description of Artificial Sequence: Synthetic polynucleotide
  source 1..348: mol_type = other DNA
caggtgcagctgcaggagtcgggcccaggactggtgaagccttcggagaccctgtccctcacctgcaatgtctctggttactccatcagcagtggttacttttggggctggatccggcagcccccagggaaggggctggagtggattgggagtatctatcatagtaggagcacctactacaacccgtccctcaagagtcgagtcaccatatcagtagacacgtccaagaaccagttctccctgaagctgaactctgtgaccgccgcagacacggccgtgtattactgtgcgcgcggttacggttacttcgattactggggtcaaggtactctggtgaccgtctcctca

SEQ ID NO: 19 - protein, 109 aa, synthetic construct
  REGION 1..109: note = Description of Artificial Sequence: Synthetic polypeptide
SYVLTQPLSVSVAPGKTARITCGGNNIGSKTVHWYQQKPGQAPVLVIYYDSDRPSGIPERFSGSNSGNTATLTISRVEAGDEADYYCQVWDSSSDHRVFGGGTKLTVLG

SEQ ID NO: 20 - protein, 116 aa, synthetic construct
  REGION 1..116: note = Description of Artificial Sequence: Synthetic polypeptide
QVQLQESGPGLVKPSETLSLTCNVSGYSISSGYFWGWIRQPPGKGLEWIGSIYHSRSTYYNPSLKSRVTISVDTSKNQFSLKLNSVTAADTAVYYCARGYGYFDYWGQGTLVTVSS

SEQ ID NO: 21 - DNA, 336 bp, synthetic construct
  misc_feature 1..336: note = Description of Artificial Sequence: Synthetic polynucleotide
  source 1..336: mol_type = other DNA
caatctgccctgactcagcctgcctccgtgtctgggtctcctggacagtcgatcaccatctcctgcactggaaccagcagtgacgttggtggttataactatgtctcctggtaccaacaacacccaggcaaagcccccaaactcatgatttatgatgtcagtaatcggccctcaggggtttctaatcgcttctctggctccaagtctggcaacacggcctccctgaccatctctgggctccaggctgaggacgaggctgattattactgcagctcatatacaagcagcagcacttcgaaggtgttcggcggagggaccaagctgaccgtcctaggt

SEQ ID NO: 22 - DNA, 360 bp, synthetic construct
  misc_feature 1..360: note = Description of Artificial Sequence: Synthetic polynucleotide
  source 1..360: mol_type = other DNA
gaggtgcagctggtggagtctgggggaggtgtggtacggcctggggggtccctgagactctcctgtgcagcctctggattcacctttggtgattatggcatgagctgggtccgccaagctccagggaaggggctggagtgggtctctggtattaattggaatggtggtagcacaggttatgcagactctgtgaagggccgattcaccatctccagagacaacgccaagaactccctgtatctgcaaatgaacagtctgagagccgaggacacggccgtatattactgtgcgcgctctaaatacaacttccatgtttactacgattactggggtcaaggtactctggtgaccgtctcctca

SEQ ID NO: 23 - protein, 112 aa, synthetic construct
  REGION 1..112: note = Description of Artificial Sequence: Synthetic polypeptide
QSALTQPASVSGSPGQSITISCTGTSSDVGGYNYVSWYQQHPGKAPKLMIYDVSNRPSGVSNRFSGSKSGNTASLTISGLQAEDEADYYCSSYTSSSTSKVFGGGTKLTVLG

SEQ ID NO: 24 - protein, 120 aa, synthetic construct
  REGION 1..120: note = Description of Artificial Sequence: Synthetic polypeptide
EVQLVESGGGVVRPGGSLRLSCAASGFTFGDYGMSWVRQAPGKGLEWVSGINWNGGSTGYADSVKGRFTISRDNAKNSLYLQMNSLRAEDTAVYYCARSKYNFHVYYDYWGQGTLVTVSS

SEQ ID NO: 25 - DNA, 333 bp, synthetic construct
  misc_feature 1..333: note = Description of Artificial Sequence: Synthetic polynucleotide
  source 1..333: mol_type = other DNA
cagtctgtgttgacgcagccaccctcagcgtctgggacccccgggcagacagtcaccatctcttgttctggaagcaactccaacatcggaagtaattatgtatactggtaccagcagctcccaggaacggcccccaaactcctcatctataggaataatcagcggccctcaggggtccctgaccgattctcaggctccaagtctggcacctcagcctccctggccatcagtgggctccgctccgaggatgaggctgattattactgtgcagcatgggatgacagcctgagtgcttatgtcttcggaactgggaccaaggtcaccgtcctaggt

SEQ ID NO: 26 - DNA, 360 bp, synthetic construct
  misc_feature 1..360: note = Description of Artificial Sequence: Synthetic polynucleotide
  source 1..360: mol_type = other DNA
caggtgcagctggtgcagtctggagctgaggtgaagaagcctggggcctcagtgaaggtctcctgcaaggcttctggttacacctttaccagctatggtatcagctgggtgcgacaggcccctggacaagggcttgagtggatgggatggatcagcgcttacaatggtaacacaaactatgcacagaagctccagggcagagtcaccatgaccacagacacatccacgagcacagcctacatggagctgaggagcctgagatctgacgacactgccgtgtattactgtgcgcgctcttctggtaacatggtttcttggaaagatatgtggggtcaaggtactctggtgaccgtctcctca

SEQ ID NO: 27 - protein, 111 aa, synthetic construct
  REGION 1..111: note = Description of Artificial Sequence: Synthetic polypeptide
QSVLTQPPSASGTPGQTVTISCSGSNSNIGSNYVYWYQQLPGTAPKLLIYRNNQRPSGVPDRFSGSKSGTSASLAISGLRSEDEADYYCAAWDDSLSAYVFGTGTKVTVLG

SEQ ID NO: 28 - protein, 120 aa, synthetic construct
  REGION 1..120: note = Description of Artificial Sequence: Synthetic polypeptide
QVQLVQSGAEVKKPGASVKVSCKASGYTFTSYGISWVRQAPGQGLEWMGWISAYNGNTNYAQKLQGRVTMTTDTSTSTAYMELRSLRSDDTAVYYCARSSGNMVSWKDMWGQGTLVTVSS

SEQ ID NO: 29 - DNA, 336 bp, synthetic construct
  misc_feature 1..336: note = Description of Artificial Sequence: Synthetic polynucleotide
  source 1..336: mol_type = other DNA
caatctgccctgactcagcctgcctccgtgtctgggtctcctggacagtcgatcaccatctcctgcactggaaccagcagtgacgttggtggttataactctgtctcctggtaccaacaacacccaggcaaagcccccagactcatgatttatgatgtcagtaatcggccctcaggggtttctaatcgcttctctggctccaagtctggcaacacggcctccctgaccatctctgggctccaggctgaggacgaggctgattattactgcagctcatatacaagcagcagcacccctttagtcttcggaactgggaccaaggtcaccgtcctaggt

SEQ ID NO: 30 - DNA, 348 bp, synthetic construct
  misc_feature 1..348: note = Description of Artificial Sequence: Synthetic polynucleotide
  source 1..348: mol_type = other DNA
caggtgcagctggtgcagtctggggctgaggtgaagaagcctggggcctcagtgaaggtctcctgcaaggcttctggttacacctttaccagctatggtatcagctgggtgcgacaggcccctggacaagggcttgagtggatgggatggatcagcgcttacaatggtaacacaaactatgcacagaagctccagggcagagtcaccatgaccacagacacatccacgagcacagcctacatggagctgaggagcctgagatctgacgacacggccgtgtattactgtgcgcgcggtgctgttgcttaccatgattggggtcaaggtactctggtgaccgtctcctca

SEQ ID NO: 31 - protein, 112 aa, synthetic construct
  REGION 1..112: note = Description of Artificial Sequence: Synthetic polypeptide
QSALTQPASVSGSPGQSITISCTGTSSDVGGYNSVSWYQQHPGKAPRLMIYDVSNRPSGVSNRFSGSKSGNTASLTISGLQAEDEADYYCSSYTSSSTPLVFGTGTKVTVLG

SEQ ID NO: 32 - protein, 116 aa, synthetic construct
  REGION 1..116: note = Description of Artificial Sequence: Synthetic polypeptide
QVQLVQSGAEVKKPGASVKVSCKASGYTFTSYGISWVRQAPGQGLEWMGWISAYNGNTNYAQKLQGRVTMTTDTSTSTAYMELRSLRSDDTAVYYCARGAVAYHDWGQGTLVTVSS

SEQ ID NO: 33 - DNA, 333 bp, synthetic construct
  misc_feature 1..333: note = Description of Artificial Sequence: Synthetic polynucleotide
  source 1..333: mol_type = other DNA
cagtctgtcgtgacgcagccgccctcagtgtctgcggccccaggacagagggtcaccatctcctgctctggaagcagctccaacatttcgatttatgatgtatcctggtatcagcagctcccaggaacagcccccaaactcctcatttatggcaataataagcgaccctcggggattgctgaccgattctctggctccacgtctggcacgtcagccaccctgggcatcaccggactccagactggggacgaggccgattattactgcggaacatgggatgacagtctgagtgggggggtgttcggcggagggaccaagctgaccgtcctaggt

SEQ ID NO: 34 - DNA, 354 bp, synthetic construct
  misc_feature 1..354: note = Description of Artificial Sequence: Synthetic polynucleotide
  source 1..354: mol_type = other DNA
cagatgcagctggtgcaatctggggctgaggtgaagaagcctgggtcctcggtgaaggtctcctgcgaggcttctggaggcaccctcagcagctatgctatcaactgggtgcgacaggcccctggacaagggcttgagtggatgggagggatcatccctatgtttggtacagcacactacgcacagaagttccagggcagagtcacgattaccgcggacgaatccacgaaaacagcctacatggagctgagcagcctgagatctgaggacactgccgtgtattactgtgcgcgcggtgttcattacgcttctttcgatcattggggtcaaggtactctggtgaccgtctcctca

SEQ ID NO: 35 - protein, 111 aa, synthetic construct
  REGION 1..111: note = Description of Artificial Sequence: Synthetic polypeptide
QSVVTQPPSVSAAPGQRVTISCSGSSSNISIYDVSWYQQLPGTAPKLLIYGNNKRPSGIADRFSGSTSGTSATLGITGLQTGDEADYYCGTWDDSLSGGVFGGGTKLTVLG

SEQ ID NO: 36 - protein, 118 aa, synthetic construct
  REGION 1..118: note = Description of Artificial Sequence: Synthetic polypeptide
QMQLVQSGAEVKKPGSSVKVSCEASGGTLSSYAINWVRQAPGQGLEWMGGIIPMFGTAHYAQKFQGRVTITADESTKTAYMELSSLRSEDTAVYYCARGVHYASFDHWGQGTLVTVSS

SEQ ID NO: 37 - DNA, 333 bp, synthetic construct
  misc_feature 1..333: note = Description of Artificial Sequence: Synthetic polynucleotide
  source 1..333: mol_type = other DNA
cagtctgtgttgacgcagccgccctcagtgtctgcggccgcaggacagaaggtcaccatctcctgctctggaagcgactccaacattgggaataattatgtgtcctggtatcaacacctcccagggacagcccccaaactcctcatttatgacgttaaaaatcgaccctcagggattcctgaccggttctccggctccaagtctggctcgtcagccaccctaggcatcgccggactccagcctggggacgaggccgattattactgcggaacatgggacagtcggctggatgcctatgtcttcggaactgggaccaaggtcaccgtcctaggt

SEQ ID NO: 38 - DNA, 351 bp, synthetic construct
  misc_feature 1..351: note = Description of Artificial Sequence: Synthetic polynucleotide
  source 1..351: mol_type = other DNA
cagatgcagctggtgcaatctggagctgaggtgaagaagcctggggcctcagtgaaggtctcctgcaagacttctggtttcccctttaatatctttggaatcacctgggtgcgacaggcccctggacaagggcttgagtggatgggatggatcagcggttacaacggtaacacagactacccacagaagttccagggcagagtcaccatgtccacagacacatccacgagtacagcctacatggagctgaggaacctgaaatctgacgacacggccgtgtattactgtgcgcgcggtgcttacggtggtatggatacttggggtcaaggtactctggtgaccgtctcctca

SEQ ID NO: 39 - protein, 111 aa, synthetic construct
  REGION 1..111: note = Description of Artificial Sequence: Synthetic polypeptide
QSVLTQPPSVSAAAGQKVTISCSGSDSNIGNNYVSWYQHLPGTAPKLLIYDVKNRPSGIPDRFSGSKSGSSATLGIAGLQPGDEADYYCGTWDSRLDAYVFGTGTKVTVLG

SEQ ID NO: 40 - protein, 117 aa, synthetic construct
  REGION 1..117: note = Description of Artificial Sequence: Synthetic polypeptide
QMQLVQSGAEVKKPGASVKVSCKTSGFPFNIFGITWVRQAPGQGLEWMGWISGYNGNTDYPQKFQGRVTMSTDTSTSTAYMELRNLKSDDTAVYYCARGAYGGMDTWGQGTLVTVSS

SEQ ID NO: 41 - DNA, 336 bp, synthetic construct
  misc_feature 1..336: note = Description of Artificial Sequence: Synthetic polynucleotide
  source 1..336: mol_type = other DNA
cagtctgtcgtgacgcagccgccctcagtgtctggggccccagggcagagggtcaccatctcctgcactgggagcacctccaacatcggggcaggttatgatgtacactggtatcagcagcttccaggaacagcccccaaactcctcatctatactaacaactttcggccctcaggggtccctgaccgattctctgcctccaagtctggcacttcagcttccctggccatcactggtctccaggctgaggatgaggctgattattactgcggaacatgggatagcagcctgagtgccgttgtgttcggcggagggaccaagctgaccgtcctaggt

SEQ ID NO: 42 - DNA, 354 bp, synthetic construct
  misc_feature 1..354: note = Description of Artificial Sequence: Synthetic polynucleotide
  source 1..354: mol_type = other DNA
gaggtgcagctggtggagtctggaactgaggtgaagaagcctggggcctcagtgaaagtctcctgcaaggcttctggttacatgtttaccagttatggtctcaactgggtgcgacaggcccctggacaagggcttgagtggatgggatggatcagcgctaacaatggtaagacaaattatgctaagaaattccaggacagagtcaccatgaccagagacacttccacgagcacaggctacatggaactgaggagcctgagatctgacgacacggccgtatattactgtgcgcgccatatcggtggttcttacttcgatcgttggggtcaaggtactctggtgaccgtctcctca

SEQ ID NO: 43 - protein, 112 aa, synthetic construct
  REGION 1..112: note = Description of Artificial Sequence: Synthetic polypeptide
QSVVTQPPSVSGAPGQRVTISCTGSTSNIGAGYDVHWYQQLPGTAPKLLIYTNNFRPSGVPDRFSASKSGTSASLAITGLQAEDEADYYCGTWDSSLSAVVFGGGTKLTVLG

SEQ ID NO: 44 - protein, 118 aa, synthetic construct
  REGION 1..118: note = Description of Artificial Sequence: Synthetic polypeptide
EVQLVESGTEVKKPGASVKVSCKASGYMFTSYGLNWVRQAPGQGLEWMGWISANNGKTNYAKKFQDRVTMTRDTSTSTGYMELRSLRSDDTAVYYCARHIGGSYFDRWGQGTLVTVSS

SEQ ID NO: 45 - DNA, 327 bp, synthetic construct
  misc_feature 1..327: note = Description of Artificial Sequence: Synthetic polynucleotide
  source 1..327: mol_type = other DNA
tcctatgtgctgactcagccaccctcagtgtcagtggccccaggaaagacggccaggattacctgtgggggaaacaacattggaagtaaaagtgtgcactggtaccagcagaagccaggccaggcccctgtgctggtcatctattatgatagcgaccggccctcagggatccctgagcgattctctggctccaactctgggaacacggccaccctgaccatcagcagggtcgaagccggggatgaggccgactattactgtcaggtgtgggatagtagtagtgatcattatgtcttcggaactgggaccaaggtcaccgtcctaggt

SEQ ID NO: 46 - DNA, 357 bp, synthetic construct
  misc_feature 1..357: note = Description of Artificial Sequence: Synthetic polynucleotide
  source 1..357: mol_type = other DNA
gaggtgcagctggtggagactgggggaggcttggtacagcctggggggtccctgagactctcctgtgcagcctctggattcacctttagcagctatgccatgagctgggtccgccaggctccagggaaggggctggagtgggtctcagctattagtggtagtgatggtagcacatactacgcagactccgtgaagggccggttcaccatctccagagacaattccaagaacacgctgtatctgcaaatgaacagcctgagagacgaggacacggccgtatattactgtgcgcgctctcatgaagctaacctggttggtgattggtggggtcaaggtactctggtgaccgtctcctca

SEQ ID NO: 47 - protein, 109 aa, synthetic construct
  REGION 1..109: note = Description of Artificial Sequence: Synthetic polypeptide
SYVLTQPPSVSVAPGKTARITCGGNNIGSKSVHWYQQKPGQAPVLVIYYDSDRPSGIPERFSGSNSGNTATLTISRVEAGDEADYYCQVWDSSSDHYVFGTGTKVTVLG

SEQ ID NO: 48 - protein, 119 aa, synthetic construct
  REGION 1..119: note = Description of Artificial Sequence: Synthetic polypeptide
EVQLVETGGGLVQPGGSLRLSCAASGFTFSSYAMSWVRQAPGKGLEWVSAISGSDGSTYYADSVKGRFTISRDNSKNTLYLQMNSLRDEDTAVYYCARSHEANLVGDWWGQGTLVTVSS

SEQ ID NO: 49 - DNA, 324 bp, synthetic construct
  misc_feature 1..324: note = Description of Artificial Sequence: Synthetic polynucleotide
  source 1..324: mol_type = other DNA
cagtctgtggtgactcagccaccctcagtgtcagtggccccaggaaagacggccaggattacctgtgggggaaacaacattggaagtaaaagtgtgcactggtaccagcagaagccaggccaggcccctgtgctggtcatctattatgatagcgaccggccctcagggatccctgagcgattctctggctccaactctgggaacacggccaccctgaccatcagcagggtcgaagccggggatgaggccgactattactgtcaggtgtgggatagtagtagtgatgtggtattcggcggagggaccaagctgaccgtcctaggt

SEQ ID NO: 50 - DNA, 354 bp, synthetic construct
  misc_feature 1..354: note = Description of Artificial Sequence: Synthetic polynucleotide
  source 1..354: mol_type = other DNA
gaggtccagctggtacagtctggagctgaggtgaagaagcctggggcctcagtgaaggtctcctgcaaggcttctggttacacctttaccagctacggtatcagctgggtgcgacaggcccctggacaagggcttgagtggatgggatggatcagcgcttacaatggtaacacaaactatgcacagaagctccagggcagagtcaccatgaccacagacacatccacgagcacagcctacatggagctgaggagcctgagatctgacgacacggccgtgtattactgtgcgcgctggggtggtttcggtgctgttgatcattggggtcaaggtactctggtgaccgtctcctca

SEQ ID NO: 51 - protein, 108 aa, synthetic construct
  REGION 1..108: note = Description of Artificial Sequence: Synthetic polypeptide
QSVVTQPPSVSVAPGKTARITCGGNNIGSKSVHWYQQKPGQAPVLVIYYDSDRPSGIPERFSGSNSGNTATLTISRVEAGDEADYYCQVWDSSSDVVFGGGTKLTVLG

SEQ ID NO: 52 - protein, 118 aa, synthetic construct
  REGION 1..118: note = Description of Artificial Sequence: Synthetic polypeptide
EVQLVQSGAEVKKPGASVKVSCKASGYTFTSYGISWVRQAPGQGLEWMGWISAYNGNTNYAQKLQGRVTMTTDTSTSTAYMELRSLRSDDTAVYYCARWGGFGAVDHWGQGTLVTVSS

SEQ ID NO: 53 - DNA, 327 bp, synthetic construct
  misc_feature 1..327: note = Description of Artificial Sequence: Synthetic polynucleotide
  source 1..327: mol_type = other DNA
tcttctgagctgactcaggaccctgctgtgtctgtggccttgggacagacagtcaagatcacgtgccaaggagacagcctcacagactaccatgcaacctggtaccagcagaagccaggacaggcccctgtcgctgtcatctatgctacaaacaaccggcccactgggatcccagaccgattctctggttccagttccggaaacacagcttctttgaccatcactggggctcaggcggaagatgaggctgactattactgtaattcccgggacagcggcacggacgaagtgttattcggcggagggaccaagctgaccgtcctaggt

SEQ ID NO: 54 - DNA, 345 bp, synthetic construct
  misc_feature 1..345: note = Description of Artificial Sequence: Synthetic polynucleotide
  source 1..345: mol_type = other DNA
gaggtgcagctggtggagactgggggaggcctggtcaagcctggggggtccctgagactctcctgtgcagcctctggattcaccttcagtagctatagcatgaactgggtccgccaggctccagggaaggggctggagtgggtctcatccattagtagtagtagtagttacatatactacgcagactcagtgaagggccgattcaccatctccagagacaacgccaagaactcactgtatctgcaaatgaacagcctgagagccgaggacacggccgtgtattactgtgcgcgcggtcagggttacgattactggggtcaaggtactctggtgaccgtctcctca

SEQ ID NO: 55 - protein, 109 aa, synthetic construct
  REGION 1..109: note = Description of Artificial Sequence: Synthetic polypeptide
SSELTQDPAVSVALGQTVKITCQGDSLTDYHATWYQQKPGQAPVAVIYATNNRPTGIPDRFSGSSSGNTASLTITGAQAEDEADYYCNSRDSGTDEVLFGGGTKLTVLG

SEQ ID NO: 56 - protein, 115 aa, synthetic construct
  REGION 1..115: note = Description of Artificial Sequence: Synthetic polypeptide
EVQLVETGGGLVKPGGSLRLSCAASGFTFSSYSMNWVRQAPGKGLEWVSSISSSSSYIYYADSVKGRFTISRDNAKNSLYLQMNSLRAEDTAVYYCARGQGYDYWGQGTLVTVSS

SEQ ID NO: 57 - DNA, 327 bp, synthetic construct
  misc_feature 1..327: note = Description of Artificial Sequence: Synthetic polynucleotide
  source 1..327: mol_type = other DNA
tcctatgtgctgactcagccaccctcggtgtcagtggccccaggaaagacggccaggattacctgtgggggaaacaacattggaagtaaaagtgtgcactggtaccagcagaagccaggccaggcccctgtgctggtcgtctatgatgatagcgaccggccctcagggatccctgagcgattctctggctccaactctgggaacacggccaccctgagcatcagcagggtcgaagccggggatgaggccgactattactgtcaggtgtgggatagtagtagtgatcatactgtcttcggaactgggaccaaggtcaccgtcctaggt

SEQ ID NO: 58 - DNA, 345 bp, synthetic construct
  misc_feature 1..345: note = Description of Artificial Sequence: Synthetic polynucleotide
  source 1..345: mol_type = other DNA
caggtgcagctacagcagtggggcgcaggactgttgaagccttcggagaccctgtccctcacctgcgctgtctatggtgggtccttcagtggttactactggagctggatccgccagcccccagggaaggggctggagtggattggggaaatcaatcatagtggaagcaccaactacaacccgtccctcaagagtcgagtcaccatatcagtagacacgtccaagaaccagttctccctgaagctgagctctgtgaccgccgcggacacggccgtgtattactgtgcgcgctactacccgggtatggatatgtggggtcaaggtactctggtgaccgtctcctca

SEQ ID NO: 59 - protein, 109 aa, synthetic construct
  REGION 1..109: note = Description of Artificial Sequence: Synthetic polypeptide
SYVLTQPPSVSVAPGKTARITCGGNNIGSKSVHWYQQKPGQAPVLVVYDDSDRPSGIPERFSGSNSGNTATLSISRVEAGDEADYYCQVWDSSSDHTVFGTGTKVTVLG

SEQ ID NO: 60 - protein, 115 aa, synthetic construct
  REGION 1..115: note = Description of Artificial Sequence: Synthetic polypeptide
QVQLQQWGAGLLKPSETLSLTCAVYGGSFSGYYWSWIRQPPGKGLEWIGEINHSGSTNYNPSLKSRVTISVDTSKNQFSLKLSSVTAADTAVYYCARYYPGMDMWGQGTLVTVSS

SEQ ID NO: 61 - DNA, 333 bp, synthetic construct
  misc_feature 1..333: note = Description of Artificial Sequence: Synthetic polynucleotide
  source 1..333: mol_type = other DNA
caggctgtgctgactcagccgccctcaacgtctgggacccccgggcagagggtcaccatctcttgttctggaagcagctccaacatcgggagaaatggtgtaaactggtaccagcagctcccaggagcggcccccaaagtcctcatctataatgataatcagcgaccctcaggggtccctgaccgagtctctggctcccagtctggctcctcaggcaccctggccatcgatgggcttcggtctgaggatgaggctgattattactgtgcggcatgggatgacagcctgcatggtgtggtattcggcggagggaccaagctgaccgtcctaggt

SEQ ID NO: 62 - DNA, 345 bp, synthetic construct
  misc_feature 1..345: note = Description of Artificial Sequence: Synthetic polynucleotide
  source 1..345: mol_type = other DNA
caggtccagctggtacagtctggggctgaggtgaagaagcctggggcctcagtgaaggtctcctgcaaggtttccggatacaccctcaatgaattatccatgcactgggtgcgacaggctcctggaaaagggcttgagtggatgggaggttttgatcctgaagatggtgaaacaatctacgcacagaagttccagggcagagtcaccatgaccgaggacacatctacagacacagcctacatggagctgagcagcctgagatctgaggacactgccgtgtattactgtgcgcgcggtggttacggtgattcttggggtcaaggtactctggtgaccgtctcctca

SEQ ID NO: 63 - protein, 111 aa, synthetic construct
  REGION 1..111: note = Description of Artificial Sequence: Synthetic polypeptide
QAVLTQPPSTSGTPGQRVTISCSGSSSNIGRNGVNWYQQLPGAAPKVLIYNDNQRPSGVPDRVSGSQSGSSGTLAIDGLRSEDEADYYCAAWDDSLHGVVFGGGTKLTVLG

SEQ ID NO: 64 - protein, 115 aa, synthetic construct
  REGION 1..115: note = Description of Artificial Sequence: Synthetic polypeptide
QVQLVQSGAEVKKPGASVKVSCKVSGYTLNELSMHWVRQAPGKGLEWMGGFDPEDGETIYAQKFQGRVTMTEDTSTDTAYMELSSLRSEDTAVYYCARGGYGDSWGQGTLVTVSS

SEQ ID NO: 65 - DNA, 336 bp, synthetic construct
  misc_feature 1..336: note = Description of Artificial Sequence: Synthetic polynucleotide
  source 1..336: mol_type = other DNA
aattttatgctgactcagccccactctgtgtcggagtctccggggaagacggtaaccatctcctgcacccgcagcagtggcagcattgccagcaactatgtgcagtggtaccagcagcgcccgggcagtgcccccaccactgtgatctatgaggataaccaaagaccctctggggtccctgatcggttctctggctccatcgacagctcctccaactctgcctccctcaccatctctggactgaagactgaggacgaggctgactactactgtcagtcttatgatagcagcaattcttgggtgttcggcggagggaccaagctgaccgtcctaggt

SEQ ID NO: 66 - DNA, 396 bp, synthetic construct
  misc_feature 1..396: note = Description of Artificial Sequence: Synthetic polynucleotide
  source 1..396: mol_type = other DNA
caggtgcagctggtgcaatctggggctgaggtgaagaggcctgggtcctcggtgaaggtctcctgcacggcttctggaggcaccttcagcagcgatgctatcagctgggtgcgacaggcccctggacaagggcttgagtggatgggaggaatcatccctatgtttggtacagcaaactacgcacagaagttccagggcagagtcacgattaccgcggacgaatccacgagcacagcctacatggagctgagcagcctgagatctgaggacacggccgtgtattactgtgcgcgcgaaggttactactacccgtctgcttacctgggttctgttctgaacgacatctcttctgtttacgatgaatggggtcaaggtactctggtgaccgtctcctca

SEQ ID NO: 67 - protein, 112 aa, synthetic construct
  REGION 1..112: note = Description of Artificial Sequence: Synthetic polypeptide
NFMLTQPHSVSESPGKTVTISCTRSSGSIASNYVQWYQQRPGSAPTTVIYEDNQRPSGVPDRFSGSIDSSSNSASLTISGLKTEDEADYYCQSYDSSNSWVFGGGTKLTVLG

SEQ ID NO: 68 - protein, 132 aa, synthetic construct
  REGION 1..132: note = Description of Artificial Sequence: Synthetic polypeptide
QVQLVQSGAEVKRPGSSVKVSCTASGGTFSSDAISWVRQAPGQGLEWMGGIIPMFGTANYAQKFQGRVTITADESTSTAYMELSSLRSEDTAVYYCAREGYYYPSAYLGSVLNDISSVYDEWGQGTLVTVSS

SEQ ID NO: 69 - DNA, 336 bp, synthetic construct
  misc_feature 1..336: note = Description of Artificial Sequence: Synthetic polynucleotide
  source 1..336: mol_type = other DNA
cagtctgtcgtgacgcagccgccctcagtgtctgcggccccaggacagaaggtcaccatctcctgctctggaagcacctccaacattggaaataatgatgtatcctggtaccagcagctcccaggaacagcccccaaactcctcatttatgacaataataagcgaccctcagggattcctgaccgattctctggctccaagtctggcacgtcagccaccctgggcatcaccggactccagactggggacgaggccgattattactgcggaacatgggatagcagcgtgagtgcttcttgggtcttcggcagagggaccaagctgaccgtcctaggt

SEQ ID NO: 70 - DNA, 348 bp, synthetic construct
  misc_feature 1..348: note = Description of Artificial Sequence: Synthetic polynucleotide
  source 1..348: mol_type = other DNA
caggtgcagctggtgcagtctggagctgaggtgaagaagcctggggcctcagtgaaggtctcctgcaaggcttctggttacacctttaccagctatggtatcagctgggtgcgacaggcccctggacaagggcttgagtggatgggatggatcagcgcttacaatggtaacacaaactatccacagaagctccagggcagagtcaccatgaccacagacccatccacgagcacagcctacatggagctgaggagcctgagatctgacgacacggccgtgtattactgtgcgcgctctatgacttctttcgattactggggtcaaggtactctggtgaccgtctcctca

SEQ ID NO: 71 - protein, 112 aa, synthetic construct
  REGION 1..112: note = Description of Artificial Sequence: Synthetic polypeptide
QSVVTQPPSVSAAPGQKVTISCSGSTSNIGNNDVSWYQQLPGTAPKLLIYDNNKRPSGIPDRFSGSKSGTSATLGITGLQTGDEADYYCGTWDSSVSASWVFGRGTKLTVLG

SEQ ID NO: 72 - protein, 116 aa, synthetic construct
  REGION 1..116: note = Description of Artificial Sequence: Synthetic polypeptide
QVQLVQSGAEVKKPGASVKVSCKASGYTFTSYGISWVRQAPGQGLEWMGWISAYNGNTNYPQKLQGRVTMTTDPSTSTAYMELRSLRSDDTAVYYCARSMTSFDYWGQGTLVTVSS

SEQ ID NO: 73 - DNA, 336 bp, synthetic construct
  misc_feature 1..336: note = Description of Artificial Sequence: Synthetic polynucleotide
  source 1..336: mol_type = other DNA
cagtctgtgttgacgcagccgccctcagtgtctgcggccccaggacagaaggtcaccatctcctgctctggaagcaactccaacattgggaataattatgtatcctggtatcagcaactcccagggacagcccccaaactcctcatttatgacaataataagcgaccctcagggattcctgaccgattctctggctccaggtctggcacgtcagccaccctgggcatcaccggactccagactggggacgaggccgattattactgcggaacatggaataccactgtgactcctggctatgtcttcggaactgggaccaaggtcaccgtcctaggt

SEQ ID NO: 74 - DNA, 348 bp, synthetic construct
  misc_feature 1..348: note = Description of Artificial Sequence: Synthetic polynucleotide
  source 1..348: mol_type = other DNA
gaagtgcagctggtgcagtctggagctgaggtgaagaagcctggggcctcagtgaaggtctcctgcaaggcttctggttacacctttaccagctatggtatcagctgggtgcgacaggcccctggacaagggcttgagtggatgggatggatcagcgcttacaatggtaacacaaactatgcacagaagctccagggcagagtcaccatgaccacagacacatccacgagcacagcctacatggagctgaggagcctgagatctgacgacaccgccatgtattactgtgcgcgctctgtttacgacctggatacttggggtcaaggtactctggtgaccgtctcctca

SEQ ID NO: 75 - protein, 112 aa, synthetic construct
  REGION 1..112: note = Description of Artificial Sequence: Synthetic polypeptide
QSVLTQPPSVSAAPGQKVTISCSGSNSNIGNNYVSWYQQLPGTAPKLLIYDNNKRPSGIPDRFSGSRSGTSATLGITGLQTGDEADYYCGTWNTTVTPGYVFGTGTKVTVLG

SEQ ID NO: 76 - protein, 116 aa, synthetic construct
  REGION 1..116: note = Description of Artificial Sequence: Synthetic polypeptide
EVQLVQSGAEVKKPGASVKVSCKASGYTFTSYGISWVRQAPGQGLEWMGWISAYNGNTNYAQKLQGRVTMTTDTSTSTAYMELRSLRSDDTAMYYCARSVYDLDTWGQGTLVTVSS

SEQ ID NO: 77 - DNA, 336 bp, synthetic construct
  misc_feature 1..336: note = Description of Artificial Sequence: Synthetic polynucleotide
  source 1..336: mol_type = other DNA
cagtctgtcgtgacgcagccgccctcagtgtctgcggccccaggacagaaggtcaccatctcctgctctggaagcagctccaacattgggaataattatgtatcctggtaccagcagctcccaggaacagcccccaaactcctcatttatgacaataataagcgaccctcagggattcctgaccgattctctggctccaagtctggcacgtcagccaccctgggcatcaccggactccagactggggacgaggccgattattactgcggaacatgggatagcagcctgggggccccttatgtcttcggaactgggaccaaggtcaccgtcctaggt

SEQ ID NO: 78 - DNA, 357 bp, synthetic construct
  misc_feature 1..357: note = Description of Artificial Sequence: Synthetic polynucleotide
  source 1..357: mol_type = other DNA
gaggtgcagctggtgcagtcttggggaggctcggaacagcctggcaggtccctgagactctcctgtgcagcctctggattcacctttgatgattatgccatgcactgggtccggcaagctccagggaagggcctggagtgggtctcaggtattagttggaatagcggtagcataggctatgcggactctgtgaagggccgattcaccatctccagagacaacgccaagaattccctgtatctgcaaatgaacagtctgagagctgaggacaccgccatgtattactgtgcgcgctaccgtcaggttggttctgcttacgattcttggggtcaaggtactctggtgaccgtctcctca

SEQ ID NO: 79 - protein, 112 aa, synthetic construct
  REGION 1..112: note = Description of Artificial Sequence: Synthetic polypeptide
QSVVTQPPSVSAAPGQKVTISCSGSSSNIGNNYVSWYQQLPGTAPKLLIYDNNKRPSGIPDRFSGSKSGTSATLGITGLQTGDEADYYCGTWDSSLGAPYVFGTGTKVTVLG

SEQ ID NO: 80 - protein, 119 aa, synthetic construct
  REGION 1..119: note = Description of Artificial Sequence: Synthetic polypeptide
EVQLVQSWGGSEQPGRSLRLSCAASGFTFDDYAMHWVRQAPGKGLEWVSGISWNSGSIGYADSVKGRFTISRDNAKNSLYLQMNSLRAEDTAMYYCARYRQVGSAYDSWGQGTLVTVSS

SEQ ID NO: 81 - DNA, 330 bp, synthetic construct
  misc_feature 1..330: note = Description of Artificial Sequence: Synthetic polynucleotide
  source 1..330: mol_type = other DNA
ctgcctgtgctgactcagccaccctcggtgtcagtggccccaggaaagacggccaggattacctgtgggggaaacaacattggaagtaaaagtgtgcactggtatcagcagaagccaggccaggcccctgtgctggtcgtctatgctgatagcgaccggccctcagggatccctgagcgattctctggctccaactctgggaacacggccaccctgaccatcagcagggtcgaagccggggatgaggccgactattactgtcaggtgtgggatagtagtagttatcataattatgtcttcggaactgggaccaaggtcaccgtcctaggt

SEQ ID NO: 82 - DNA, 354 bp, synthetic construct
  misc_feature 1..354: note = Description of Artificial Sequence: Synthetic polynucleotide
  source 1..354: mol_type = other DNA
gaggtgcagctggtgcagtctggagctgaggtgaagaagcctggggcctcagtgaaggtctcctgcaaggcttctggttacacctttaccagctatggtatcagctgggtgcgacaggcccctggacaagggcttgagtggatgggatggatcagcgcttacaatggtaacacaaactatgcacagaagctccagggcagagtcaccatgaccacagacacatccacgagcacagcctacatggagctgagcagcctgagatctgaggacaccgccatgtattactgtgcgcgctactggggtttcggtgtttctgatcgttggggtcaaggtactctggtgaccgtctcctca

SEQ ID NO: 83 - protein, 110 aa, synthetic construct
  REGION 1..110: note = Description of Artificial Sequence: Synthetic polypeptide
LPVLTQPPSVSVAPGKTARITCGGNNIGSKSVHWYQQKPGQAPVLVVYADSDRPSGIPERFSGSNSGNTATLTISRVEAGDEADYYCQVWDSSSYHNYVFGTGTKVTVLG

SEQ ID NO: 84 - protein, 118 aa, synthetic construct
  REGION 1..118: note = Description of Artificial Sequence: Synthetic polypeptide
EVQLVQSGAEVKKPGASVKVSCKASGYTFTSYGISWVRQAPGQGLEWMGWISAYNGNTNYAQKLQGRVTMTTDTSTSTAYMELSSLRSEDTAMYYCARYWGFGVSDRWGQGTLVTVSS

SEQ ID NO: 85 - DNA, 336 bp, synthetic construct
  misc_feature 1..336: note = Description of Artificial Sequence: Synthetic polynucleotide
  source 1..336: mol_type = other DNA
aattttatgctgactcagccccactctgtgtcggagtctccggggaagacggtaaccatctcctgcaccggcagcagtggcagcattgccagcaactatgtgcagtggtaccagcagcgcccgggcagtgcccccaccactgtgatctatgaggataaccaaagaccctctggggtccccgatcggttctctggctccatcgacagctcctccaactctgcctccctcaccatctctggactgaagactgaggacgaggctgactactactgtcagtcttatgacagcagcaatctttgggtgttcggcggagggaccaagctgaccgtcctaggt

SEQ ID NO: 86 - DNA, 351 bp, synthetic construct
  misc_feature 1..351: note = Description of Artificial Sequence: Synthetic polynucleotide
  source 1..351: mol_type = other DNA
cagatgcagctggtgcagtctggggctgaggtgaagaagcctgggtcctcggtgaaggtctcctgcaaggcttctggaggcaccttcagcagctatgctatcagctgggtgcgacaggcccctggacaagggcttgagtggatgggagggatcatccctatctttggtacagcaaactacgcacagaagttccagggcagagtcacgattaccgcggacgaatccacgagcacagcctacatggagctgagcagcctgagatctgaggacactgccgtgtattactgtgcgcgctacaactactactactacgattcttggggtcaaggtactctggtgaccgtctcctca

SEQ ID NO: 87 - protein, 112 aa, synthetic construct
  REGION 1..112: note = Description of Artificial Sequence: Synthetic polypeptide
NFMLTQPHSVSESPGKTVTISCTGSSGSIASNYVQWYQQRPGSAPTTVIYEDNQRPSGVPDRFSGSIDSSSNSASLTISGLKTEDEADYYCQSYDSSNLWVFGGGTKLTVLG

SEQ ID NO: 88 - protein, 117 aa, synthetic construct
  REGION 1..117: note = Description of Artificial Sequence: Synthetic polypeptide
QMQLVQSGAEVKKPGSSVKVSCKASGGTFSSYAISWVRQAPGQGLEWMGGIIPIFGTANYAQKFQGRVTITADESTSTAYMELSSLRSEDTAVYYCARYNYYYYDSWGQGTLVTVSS

SEQ ID NO: 89 - DNA, 324 bp, synthetic construct
  misc_feature 1..324: note = Description of Artificial Sequence: Synthetic polynucleotide
  source 1..324: mol_type = other DNA
gacatccagatgacccagtctccatcctccctgtctgcatctgtaggagacagagtcaccatcacttgccgggcaagtcagagcattagcagctatttaaattggtatcagcagaaaccagggaaagcccctaagctcctgatctatgctgcatccagtttgcaaagtggggtcccatcaaggttcagtggcagtggatctgggacagatttcactctcaccatcagcagtctgcaacctgaagattttgcaacttactactgtcaacagagttacagtaccccattcactttcggccctgggaccaaagtggatatcaaacgt

SEQ ID NO: 90 - DNA, 354 bp, synthetic construct
  misc_feature 1..354: note = Description of Artificial Sequence: Synthetic polynucleotide
  source 1..354: mol_type = other DNA
gaggtgcagctggtgcagtctggggctgaggtgaagaagcctgggtcctcggtgaaggtctcctgcaaggcttctggaggcaccttcagcagctatgctatcagctgggtgcgacaggcccctggacaagggcttgagtggatgggagggatcatccctatctttggtacagcaaactacgcacagaagttccagggcagagtcacgattaccgcggacgaatccacgagcacagcctacatggagctgagcagcctgagatctgaggacaccgccatgtattactgtgcgcgctactggggttacgactcttacgatgaatggggtcaaggtactctggtgaccgtctcctca

SEQ ID NO: 91 - protein, 108 aa, synthetic construct
  REGION 1..108: note = Description of Artificial Sequence: Synthetic polypeptide
DIQMTQSPSSLSASVGDRVTITCRASQSISSYLNWYQQKPGKAPKLLIYAASSLQSGVPSRFSGSGSGTDFTLTISSLQPEDFATYYCQQSYSTPFTFGPGTKVDIKR

SEQ ID NO: 92 - protein, 118 aa, synthetic construct
  REGION 1..118: note = Description of Artificial Sequence: Synthetic polypeptide
EVQLVQSGAEVKKPGSSVKVSCKASGGTFSSYAISWVRQAPGQGLEWMGGIIPIFGTANYAQKFQGRVTITADESTSTAYMELSSLRSEDTAMYYCARYWGYDSYDEWGQGTLVTVSS

SEQ ID NO: 93 - DNA, 333 bp, synthetic construct
  misc_feature 1..333: note = Description of Artificial Sequence: Synthetic polynucleotide
  source 1..333: mol_type = other DNA
aattttatgctgactcagccccactctgtgtcggagtctccggggaagacggtaaccatctcctgcaccggcagcagtggcagcattgccagcaactatgtgcagtggtaccagcagcgcccgggcagtgcccccaccactgtgatctatgaggataaccaaagaccctctggggtccctgatcggttctctggctccatcgacagctcctccaactctgcctccctcaccatctctggactgaagactgaggacgaggctgactactactgtcagtcttatgatagcagcaattgggtgttcggcggagggaccaagctgaccgtcctaggt

SEQ ID NO: 94 - DNA, 351 bp, synthetic construct
  misc_feature 1..351: note = Description of Artificial Sequence: Synthetic polynucleotide
  source 1..351: mol_type = other DNA
gaggtccagctggtgcagtctggggctgaggtgaagaagcctgggtcctcggtgaaggtctcctgcaaggcttctggaggcaccttcagcagctatgctatcagctgggtgcgacaggcccctggacaagggcttgagtggatgggagggatcatccctatctttggtacagcaaactacgcacagaagttccagggcagagtcacgattaccgcggacgaatccacgagcacagcctacatggagctgagcagcctgagatctgaggacacggccgtgtattactgtgcgcgcaacaaccattactacaacgattactggggtcaaggtactctggtgaccgtctcctca

SEQ ID NO: 95 - protein, 111 aa, synthetic construct
  REGION 1..111: note = Description of Artificial Sequence: Synthetic polypeptide
NFMLTQPHSVSESPGKTVTISCTGSSGSIASNYVQWYQQRPGSAPTTVIYEDNQRPSGVPDRFSGSIDSSSNSASLTISGLKTEDEADYYCQSYDSSNWVFGGGTKLTVLG

SEQ ID NO: 96 - protein, 117 aa, synthetic construct
  REGION 1..117: note = Description of Artificial Sequence: Synthetic polypeptide
EVQLVQSGAEVKKPGSSVKVSCKASGGTFSSYAISWVRQAPGQGLEWMGGIIPIFGTANYAQKFQGRVTITADESTSTAYMELSSLRSEDTAVYYCARNNHYYNDYWGQGTLVTVSS

SEQ ID NO: 97 - DNA, 336 bp, synthetic construct
  misc_feature 1..336: note = Description of Artificial Sequence: Synthetic polynucleotide
  source 1..336: mol_type = other DNA
cagtctgtgttgacgcagccgccctcagtgtctggggccccagggcagggggtcaccatcccctgcactgggagcagctccaacatcggggcaggttatgatgtacactggtaccagcagcttccagggacagcccccaaactcctcatctatggtaacaacaatcggccctcaggggtccctgaccgcttctctggctccaggtctggctcctcagcctccctggccatcactgggctccaggctgaggatgaggctgattattactgccagtcctatgacagcagcctgagtgatgtggtattcggcggagggaccaaggtcaccgtcctaggt

SEQ ID NO: 98 - DNA, 378 bp, synthetic construct
  misc_feature 1..378: note = Description of Artificial Sequence: Synthetic polynucleotide
  source 1..378: mol_type = other DNA
gaggtccagctggtgcagtctggggctgaggtgaagaagcctggggctacagtgaaaatctcctgcaaggtttctggatacaccttcaccgactactacatgcactgggtgcaacaggcccctggaaaagggcttgagtggatgggacttgttgatcctgaagatggtgaaacaatatacgcagagaagttccagggcagagtcaccataaccgcggacacgtctacagacacagcctacatggagctgagcagcctgagatctgaggacacggccgtgtattactgtgcgcgctactggtcttactctttcgactacctgtacatgccggaaggtaacgattggtggggtcaaggtactctggtgaccgtctcctca

SEQ ID NO: 99 - protein, 112 aa, synthetic construct
  REGION 1..112: note = Description of Artificial Sequence: Synthetic polypeptide
QSVLTQPPSVSGAPGQGVTIPCTGSSSNIGAGYDVHWYQQLPGTAPKLLIYGNNNRPSGVPDRFSGSRSGSSASLAITGLQAEDEADYYCQSYDSSLSDVVFGGGTKVTVLG

SEQ ID NO: 100 - protein, 126 aa, synthetic construct
  REGION 1..126: note = Description of Artificial Sequence: Synthetic polypeptide
EVQLVQSGAEVKKPGATVKISCKVSGYTFTDYYMHWVQQAPGKGLEWMGLVDPEDGETIYAEKFQGRVTITADTSTDTAYMELSSLRSEDTAVYYCARYWSYSFDYLYMPEGNDWWGQGTLVTVSS

SEQ ID NO: 101 - DNA, 333 bp, synthetic construct
  misc_feature 1..333: note = Description of Artificial Sequence: Synthetic polynucleotide
  source 1..333: mol_type = other DNA
cagtctgtgttgactcagccacccgcagcgtctgggacccccggacagagagtcaccatctcttgttctgggggcgtctccaacatcgggagtggtgctctaaattggtaccagcaactcccaggaacggcccccaaactcctcatctatagttacaatcagcggccctcaggggtctctgaccgattctctggctccaggtctgccacctcagcctccctggccatcagtgggctccagtctgaggatgaggctgattattactgtgcaacctgggatgatagtgtgaatggttgggtgttcggcggagggaccaagctgaccgtcctaggt

SEQ ID NO: 102 - DNA, 357 bp, synthetic construct
  misc_feature 1..357: note = Description of Artificial Sequence: Synthetic polynucleotide
  source 1..357: mol_type = other DNA
caggtccagctggtacagtctggagctgaggtgaagaagcctggggattcagtgaaggtctcctgcaagccttctggttacaattttctcaactatggtatcaactgggtgcgacaggcccctggacaagggcttgagtggatgggatggattagcacttacaccggtaacacaaactatgcacagaagctgcagggcagagtcaccttcaccacagacacatccacgagcacagcctacatggagatgaggagcctgagatctgacgacacggccgtgtattactgtgcgcgcgacctgtactactacgaaggtgttgattactggggtcaaggtactctggtgaccgtctcctca

SEQ ID NO: 103 - protein, 111 aa, synthetic construct
  REGION 1..111: note = Description of Artificial Sequence: Synthetic polypeptide
QSVLTQPPAASGTPGQRVTISCSGGVSNIGSGALNWYQQLPGTAPKLLIYSYNQRPSGVSDRFSGSRSATSASLAISGLQSEDEADYYCATWDDSVNGWVFGGGTKLTVLG

SEQ ID NO: 104 - protein, 119 aa, synthetic construct
  REGION 1..119: note = Description of Artificial Sequence: Synthetic polypeptide
QVQLVQSGAEVKKPGDSVKVSCKPSGYNFLNYGINWVRQAPGQGLEWMGWISTYTGNTNYAQKLQGRVTFTTDTSTSTAYMEMRSLRSDDTAVYYCARDLYYYEGVDYWGQGTLVTVSS

SEQ ID NO: 105 - DNA, 327 bp, synthetic construct
  misc_feature 1..327: note = Description of Artificial Sequence: Synthetic polynucleotide
  source 1..327: mol_type = other DNA
caggctgtgctgactcagccaccctcagtgtcagtggccccaggaaagacggccagggttacctgtgggggaaacaacattggaagtgaaagtgtgcactggtaccagcagaagccaggccaggcccctgtgttggtcatctattatgataccgaccggccctcagggatccctgagcgattctctggctcccactctgggaccacggccaccctgaccatcagcagggtcgaagccggggatgaggccgactattactgtcaggtgtgggatagtagtagggatcatgtggtattcggcggagggaccaagctgaccgtcctaggt

SEQ ID NO: 106 - DNA, 357 bp, synthetic construct
  misc_feature 1..357: note = Description of Artificial Sequence: Synthetic polynucleotide
  source 1..357: mol_type = other DNA
caggtgcagctggtgcagtctgggggaggcgtggtccagcctgggaggtccctgagactctcctgtgcggcctctggattcaccttcagtagctatgctatgcactgggtccgccaggctccaggcaagggactggagtgggtggcagttatatcatatgatggaagcaataaatactacgcagactccgtgaagggcctattcaccatctccagagacaattccaagaacacgctgtatctgcaaatgaacagcctgagagctgaggacacggccgtgtattactgtgcgcgctcttacttcacttctggtttctacgattactggggtcaaggtactctggtgaccgtctcctca

SEQ ID NO: 107 - protein, 109 aa, synthetic construct
  REGION 1..109: note = Description of Artificial Sequence: Synthetic polypeptide
QAVLTQPPSVSVAPGKTARVTCGGNNIGSESVHWYQQKPGQAPVLVIYYDTDRPSGIPERFSGSHSGTTATLTISRVEAGDEADYYCQVWDSSRDHVVFGGGTKLTVLG

SEQ ID NO: 108 - protein, 119 aa, synthetic construct
  REGION 1..119: note = Description of Artificial Sequence: Synthetic polypeptide
QVQLVQSGGGVVQPGRSLRLSCAASGFTFSSYAMHWVRQAPGKGLEWVAVISYDGSNKYYADSVKGLFTISRDNSKNTLYLQMNSLRAEDTAVYYCARSYFTSGFYDYWGQGTLVTVSS

SEQ ID NO: 109 - DNA, 339 bp, synthetic construct
  misc_feature 1..339: note = Description of Artificial Sequence: Synthetic polynucleotide
  source 1..339: mol_type = other DNA
cagtctgtcgtgacgcagccgccctcagtgtctggggccccagggcagagggtcaccatctcctgcactgggagcagttccaacatcggggcaggttatgatgtaaattggtatcagcagtttccaggaacagcccccaaactcctcatctatggtaacagcaatcggccctcaggggtccctgaccgattctctggctccaagtctggcacctcagcctccctggccatcactgggctccaggctgaggatgaggctgattattactgccagtcctatgacagcagcctgagtggctcttatgtcttcggaactgggaccaaggtcaccgtcctaggt

SEQ ID NO: 110 - DNA, 348 bp, synthetic construct
  misc_feature 1..348: note = Description of Artificial Sequence: Synthetic polynucleotide
  source 1..348: mol_type = other DNA
cagatgcagctggtgcagtctggggctgaggtgaagaagcctggggcctcagtgaaggtctcctgcaaggcttccggatacaccctcactgaattatccatgcactgggtgcgacaggctcctggaaaagggcttgagtggatgggaggttttgatcctgaagatggtgaaacaatctacgcacagaagttccagggcagagtcaccatgaccgaggacacatctacagacacagcctacatggagctgagcagcctgagatctgaggacactgccgtgtattactgtgcgcgcatgtcttctatgtactacgattggggtcaaggtactctggtgaccgtctcctca

SEQ ID NO: 111 - protein, 113 aa, synthetic construct
  REGION 1..113: note = Description of Artificial Sequence: Synthetic polypeptide
QSVVTQPPSVSGAPGQRVTISCTGSSSNIGAGYDVNWYQQFPGTAPKLLIYGNSNRPSGVPDRFSGSKSGTSASLAITGLQAEDEADYYCQSYDSSLSGSYVFGTGTKVTVLG

SEQ ID NO: 112 - protein, 116 aa, synthetic construct
  REGION 1..116: note = Description of Artificial Sequence: Synthetic polypeptide
QMQLVQSGAEVKKPGASVKVSCKASGYTLTELSMHWVRQAPGKGLEWMGGFDPEDGETIYAQKFQGRVTMTEDTSTDTAYMELSSLRSEDTAVYYCARMSSMYYDWGQGTLVTVSS

SEQ ID NO: 113 - DNA, 324 bp, synthetic construct
  misc_feature 1..324: note = Description of Artificial Sequence: Synthetic polynucleotide
  source 1..324: mol_type = other DNA
tcctatgtgctgactcagccaccctcagtgtcagtggccccaggaaagacggccaggattacctgtgggggaaacaacattggaagtaaaagtgtgcactggtaccagcagaagccaggccaggcccctgtgctggtcatctattatgatagcgaccggccctcagggatccctgagcgattctctggctccaactctgggaacacggccaccctgaccatcagcagggtcgaagccggggatgaggccgactattactgtcaggtgtgggatagtagtagtgattatgtcttcggaactgggaccaaggtcaccgtcctaggt

SEQ ID NO: 114 - DNA, 345 bp, synthetic construct
  misc_feature 1..345: note = Description of Artificial Sequence: Synthetic polynucleotide
  source 1..345: mol_type = other DNA
gaggtgcagctggtggagactgggggaggcttggtcaagcctggagggtccctgagactctcctgtgcagcctctggattcaccgtcagtgactactacatgagctggatccgccaggctccagggaagggcctggagtggatttcatacattagtggtagtggtaatagcatatactacgcagactctgtgaagggccgattcaccatctccagggacaacgccaagaactcactggatctgcaaatgaccagcctgagagccgaggacacggccgtatattactgtgcgcgctctactaaattcgattactggggtcaaggtactctggtgaccgtctcctca

SEQ ID NO: 115 - protein, 108 aa, synthetic construct
  REGION 1..108: note = Description of Artificial Sequence: Synthetic polypeptide
SYVLTQPPSVSVAPGKTARITCGGNNIGSKSVHWYQQKPGQAPVLVIYYDSDRPSGIPERFSGSNSGNTATLTISRVEAGDEADYYCQVWDSSSDYVFGTGTKVTVLG

SEQ ID NO: 116 - protein, 115 aa, synthetic construct
  REGION 1..115: note = Description of Artificial Sequence: Synthetic polypeptide
EVQLVETGGGLVKPGGSLRLSCAASGFTVSDYYMSWIRQAPGKGLEWISYISGSGNSIYYADSVKGRFTISRDNAKNSLDLQMTSLRAEDTAVYYCARSTKFDYWGQGTLVTVSS

SEQ ID NO: 117 - DNA, 333 bp, synthetic construct
  misc_feature 1..333: note = Description of Artificial Sequence: Synthetic polynucleotide
  source 1..333: mol_type = other DNA
ctgcctgtgctgactcagccaccctcagcgtctgggacccccgggcagagggtcaccatctcttgttctggaagcagctccaacgtcggaagttacactgtaaactggtaccggcaactcccaggaacggcccccacactcctcatctataataataatcagcggccctcaggggtccctgaccgattctctgactccaagtctggcacctcggcctccctgaccattagtgggctccagcctgaggatgaggctgattattattgtgcagcatgggatgacaggctgggtggttatgtcttcggaactgggaccaaggtcaccgtcctaggt

SEQ ID NO: 118 - DNA, 357 bp, synthetic construct
  misc_feature 1..357: note = Description of Artificial Sequence: Synthetic polynucleotide
  source 1..357: mol_type = other DNA
gaggtgcagctggtgcagtctggagcagaggtgaaaaagccgggggagtctctgaagatctcctgtaagggttctggatacagctttaccaactactggatcggctgggtgcgccagatgcccgggaaaggcctggagtggatggggatcatctatcctggtgactctgataccagatacagcccgtccttccaaggccaggtcaccatctcagccgacaagtccatcagcaccgcctacctacagtggagcagcctgaaggcctcggacaccgccatgtattactgtgcgcgctctactggttcttctcatatgtctgatgaatggggtcaaggtactctggtgaccgtctcctca

SEQ ID NO: 119 - protein, 111 aa, synthetic construct
  REGION 1..111: note = Description of Artificial Sequence: Synthetic polypeptide
LPVLTQPPSASGTPGQRVTISCSGSSSNVGSYTVNWYRQLPGTAPTLLIYNNNQRPSGVPDRFSDSKSGTSASLTISGLQPEDEADYYCAAWDDRLGGYVFGTGTKVTVLG

SEQ ID NO: 120 - protein, 119 aa, synthetic construct
  REGION 1..119: note = Description of Artificial Sequence: Synthetic polypeptide
EVQLVQSGAEVKKPGESLKISCKGSGYSFTNYWIGWVRQMPGKGLEWMGIIYPGDSDTRYSPSFQGQVTISADKSISTAYLQWSSLKASDTAMYYCARSTGSSHMSDEWGQGTLVTVSS

SEQ ID NO: 121 - DNA, 336 bp, synthetic construct
  misc_feature 1..336: note = Description of Artificial Sequence: Synthetic polynucleotide
  source 1..336: mol_type = other DNA
aattttatgctgactcagccccactctgtgtcggagtctccggggaagacggtaaccatctcctgcaccggcagcagtggcagcattgccagcaactatgtgcagtggtaccagcagcgcccgggcagtgcccccaccactgtgatctatgaggataaccaaagaccctctggggtccctgatcggttctctggctccatcgacagctcctccaactctgcctccctcaccatctctggactgaagactgaggacgaggctgactactactgtcagtcttatgatagcagcaatcattgggtgttcggcggagggaccaagctgaccgtcctaggt

SEQ ID NO: 122 - DNA, 345 bp, synthetic construct
  misc_feature 1..345: note = Description of Artificial Sequence: Synthetic polynucleotide
  source 1..345: mol_type = other DNA
caagtgcagctacagcagtggggcgcaggactgttgaagccttcggagaccctgtccctcacctgcgctgtctatggtgggtccttcagtggttactactggagctggatccgccagcccccagggaaggggctggagtggattggggagatcactcatagtggaaggtccaactacaacccgtccctcaagagtcgagtcaccatatcagtagacacgtccaagaaccagttctccctgaagctgagctctgtgaccgccgcggacacggccgtgtattactgtgcgcgctcttctatcatgtctgattactggggtcaaggtactctggtgaccgtctcctca

SEQ ID NO: 123 - protein, 112 aa, synthetic construct
  REGION 1..112: note = Description of Artificial Sequence: Synthetic polypeptide
NFMLTQPHSVSESPGKTVTISCTGSSGSIASNYVQWYQQRPGSAPTTVIYEDNQRPSGVPDRFSGSIDSSSNSASLTISGLKTEDEADYYCQSYDSSNHWVFGGGTKLTVLG

SEQ ID NO: 124 - protein, 115 aa, synthetic construct
  REGION 1..115: note = Description of Artificial Sequence: Synthetic polypeptide
QVQLQQWGAGLLKPSETLSLTCAVYGGSFSGYYWSWIRQPPGKGLEWIGEITHSGRSNYNPSLKSRVTISVDTSKNQFSLKLSSVTAADTAVYYCARSSIMSDYWGQGTLVTVSS

SEQ ID NO: 125 - DNA, 336 bp, synthetic construct
  misc_feature 1..336: note = Description of Artificial Sequence: Synthetic polynucleotide
  source 1..336: mol_type = other DNA
cagtctgtgttgacgcagccgccctcagtgtctggggccccagggcagagggtcaccatctcctgcactgggagcacctccaacatcggggcaggttatgatgtacactggtaccagcagcttccaggaacagcccccaaactcctcatcaacaataacaggaatcggccctcaggggtccctgaccgattctctggctccaagtctggcacgtcagccaccctgggcatcaccggactccagactggggacgaggccgattattactgcggaacatgggatggcagcctgactggtgcagtgttcggcggagggaccaagctgaccgtcctaggt

SEQ ID NO: 126 - DNA, 354 bp, synthetic construct
  misc_feature 1..354: note = Description of Artificial Sequence: Synthetic polynucleotide
  source 1..354: mol_type = other DNA
gaggtccagctggtgcagtctggggctgaggtgaagaagcctgggtcctcggtgaaggtctcatgcaaggcttctggaggcaccttcagcagctatgctatcagctgggtgcgacaggcccctggacaagggcttgagtggatgggagggatcatccctatctttggtacagcaaactacgcacagaagttccagggcagagtcacgattaccgcggacgaatccacgagcacagcctacatggagctgagcagcctgagatctgaggacacggccgtgtattactgtgcgcgcggttctgctctggaccattacgatcgttggggtcaaggtactctggtgaccgtctcctca

SEQ ID NO: 127 - protein, 112 aa, synthetic construct
  REGION 1..112: note = Description of Artificial Sequence: Synthetic polypeptide
QSVLTQPPSVSGAPGQRVTISCTGSTSNIGAGYDVHWYQQLPGTAPKLLINNNRNRPSGVPDRFSGSKSGTSATLGITGLQTGDEADYYCGTWDGSLTGAVFGGGTKLTVLG

SEQ ID NO: 128 - protein, 118 aa, synthetic construct
  REGION 1..118: note = Description of Artificial Sequence: Synthetic polypeptide
EVQLVQSGAEVKKPGSSVKVSCKASGGTFSSYAISWVRQAPGQGLEWMGGIIPIFGTANYAQKFQGRVTITADESTSTAYMELSSLRSEDTAVYYCARGSALDHYDRWGQGTLVTVSS

SEQ ID NO: 129 - DNA, 333 bp, synthetic construct
  misc_feature 1..333: note = Description of Artificial Sequence: Synthetic polynucleotide
  source 1..333: mol_type = other DNA
aattttatgctgactcagccccactctgtgtcggagtctccggggaagacggtaaccatctcctgcacccgcagcagtggcagcattgccagcaactatgtgcagtggtaccagcagcgcccgggcagtgcccccaccactgtgatctatgaggataaccaaagaccctctggggtccctgatcggttctctggctccatcgacagctcctccaactctgcctccctcaccatctctggactgaagactgaggacgaggctgactactactgtcagtcttatgatagcaccaattgggtgttcggcggagggaccaagctgaccgtcctaggt

SEQ ID NO: 130 - DNA, 351 bp, synthetic construct
  misc_feature 1..351: note = Description of Artificial Sequence: Synthetic polynucleotide
  source 1..351: mol_type = other DNA
caggtgcagctggtgcagtctggggctgaggtgaagaagcctgggtcctcggtgaaggtctcctgcaaggcttctggaggcaccttcagcagctatgctatcagctgggtgcgacaggcccctggacaagggcttgagtggatgggagggatcatccctatctttggtacagcaaactacgcacagaagttccagggcagagtcacgattaccgcggacgaatccacgagcacagcctacatggagctgagcagcctgagatctgaggacactgccgtgtattactgtgcgcgctacaactactacttcaacgattactggggtcaaggtactctggtgaccgtctcctca

SEQ ID NO: 131 - protein, 111 aa, synthetic construct
  REGION 1..111: note = Description of Artificial Sequence: Synthetic polypeptide
NFMLTQPHSVSESPGKTVTISCTRSSGSIASNYVQWYQQRPGSAPTTVIYEDNQRPSGVPDRFSGSIDSSSNSASLTISGLKTEDEADYYCQSYDSTNWVFGGGTKLTVLG

SEQ ID NO: 132 - protein, 117 aa, synthetic construct
  REGION 1..117: note = Description of Artificial Sequence: Synthetic polypeptide
QVQLVQSGAEVKKPGSSVKVSCKASGGTFSSYAISWVRQAPGQGLEWMGGIIPIFGTANYAQKFQGRVTITADESTSTAYMELSSLRSEDTAVYYCARYNYYFNDYWGQGTLVTVSS

SEQ ID NO: 133 - DNA, 330 bp, synthetic construct
  misc_feature 1..330: note = Description of Artificial Sequence: Synthetic polynucleotide
  source 1..330: mol_type = other DNA
tcctatgtgctgactcagccaccctcagtgtcagtggccccaggaaagacggccaggattacctgtgggggaaacaacattggaagtaaaagtgtgcactggtaccagcagaagccaggccaggcccctgtgctggtcatctattatgatagcgaccggccctcagggatccctgagcgattctctggctccaactctgggaacacggccaccctgaccatcagcagggtcgaagccggggatgaggccgactattactgtcaggtgtgggatagtagtagtgatcatccttatgtcttcggaactgggaccaaggtcaccgtcctaggt

SEQ ID NO: 134 - DNA, 351 bp, synthetic construct
  misc_feature 1..351: note = Description of Artificial Sequence: Synthetic polynucleotide
  source 1..351: mol_type = other DNA
cagatgcagctggtgcagtctggagctgaggtgaagaagcctggggcctcagtgaaggtctcctgcaaggcttctggttacacctttaccagctatggtatcagctgggtgcgacaggcccctggacaagggcttgagtggatgggatggatcagcgcttacaatggtaacacaaactatgcacagaagctccagggcagagtcaccatgaccacagacacatccacgagcacagcctacatggagctgaggagcctgagatctgacgacactgccgtgtattactgtgcgcgctctatgttcggtgctcatgattcttggggtcaaggtactctggtgaccgtctcctca

SEQ ID NO: 135 - protein, 110 aa, synthetic construct
  REGION 1..110: note = Description of Artificial Sequence: Synthetic polypeptide
SYVLTQPPSVSVAPGKTARITCGGNNIGSKSVHWYQQKPGQAPVLVIYYDSDRPSGIPERFSGSNSGNTATLTISRVEAGDEADYYCQVWDSSSDHPYVFGTGTKVTVLG

SEQ ID NO: 136 - protein, 117 aa, synthetic construct
  REGION 1..117: note = Description of Artificial Sequence: Synthetic polypeptide
QMQLVQSGAEVKKPGASVKVSCKASGYTFTSYGISWVRQAPGQGLEWMGWISAYNGNTNYAQKLQGRVTMTTDTSTSTAYMELRSLRSDDTAVYYCARSMFGAHDSWGQGTLVTVSS

SEQ ID NO: 137 - DNA, 336 bp, synthetic construct
  misc_feature 1..336: note = Description of Artificial Sequence: Synthetic polynucleotide
  source 1..336: mol_type = other DNA
cagtctgtgttgacgcagccgccctcagtgtctggggccccagggcagagggtcaccatctcctgcactgggagcagctccaacatcggggcaggttttgatgtacactggtaccagctacttccaggaacagcccccaaactcctcatctatgctaacagcaatcggccctcaggggtccctgaccgattctctggctccaagtctggcacctcagcctccctggccatcactgggctcctggctgaggatgaggctgattattactgccagtcctatgacagcagcctgagtggtgtggtattcggcggagggaccaagctgaccgtcctaggt

SEQ ID NO: 138 - DNA, 354 bp, synthetic construct
  misc_feature 1..354: note = Description of Artificial Sequence: Synthetic polynucleotide
  source 1..354: mol_type = other DNA
caggtgcagctggtgcaatctggggctgaggtgaagaagcctgggtcctcggtgaaggtctcctgcaaggcttctggaggcaccttcagcagctatgctatcagctgggtgcgacaggcccctggacaagggcttgagtggatgggagggatcatccctatctttggtacagcaaactacgcacagaagttccagggcagagtcacgattaccgcggacgaatccacgagcacagcctacatggagctgagcagcctgagatctgaggacactgccgtgtattactgtgcgcgcggtgcttctttcgaccgtcatgataactggggtcaaggtactctggtgaccgtctcctca

SEQ ID NO: 139 - protein, 112 aa, synthetic construct
  REGION 1..112: note = Description of Artificial Sequence: Synthetic polypeptide
QSVLTQPPSVSGAPGQRVTISCTGSSSNIGAGFDVHWYQLLPGTAPKLLIYANSNRPSGVPDRFSGSKSGTSASLAITGLLAEDEADYYCQSYDSSLSGVVFGGGTKLTVLG

SEQ ID NO: 140 - protein, 118 aa, synthetic construct
  REGION 1..118: note = Description of Artificial Sequence: Synthetic polypeptide
QVQLVQSGAEVKKPGSSVKVSCKASGGTFSSYAISWVRQAPGQGLEWMGGIIPIFGTANYAQKFQGRVTITADESTSTAYMELSSLRSEDTAVYYCARGASFDRHDNWGQGTLVTVSS

SEQ ID NO: 141 - DNA, 333 bp, synthetic construct
  misc_feature 1..333: note = Description of Artificial Sequence: Synthetic polynucleotide
  source 1..333: mol_type = other DNA
aattttatgctgactcagccccactctgtgtcggagtctccggggaagacggtaaccatctcctgcacccgcagcagtggcagcattgccagcaactatgtgcagtggtaccagcagcgcccgggcagttcccccaccactgtgatctatgaggataaccaaagaccctctggggtccctgatcggttctctggctccatcgacagctcctccaactctgcctccctcaccatctctggactgaagactgaggacgaggctgactactactgtcagtcttatgatagcagcaattgggtgttcggcggagggaccaagctgaccgtcctaggt

SEQ ID NO: 142 - DNA, 351 bp, synthetic construct
  misc_feature 1..351: note = Description of Artificial Sequence: Synthetic polynucleotide
  source 1..351: mol_type = other DNA
gaggtccagctggtgcagtctggggctgaggtgaagaagcctgggtcctcggtgaaggtctcctgcaaggcttctggaggcaccttcagcagctatgctatcagctgggtgcgacaggcccctggacaagggcttgagtggatgggagggatcatccctatctttggtacagcaaactacgcacagaagttccagggcagagtcacgattaccgcggacgaatccacgagcacagcctacatggagctgagcagcctgagatctgaggacacggccgtgtattactgtgcgcgctctaactactactacaacgattactggggtcaaggtactctggtgaccgtctcctca

SEQ ID NO: 143 - protein, 111 aa, synthetic construct
  REGION 1..111: note = Description of Artificial Sequence: Synthetic polypeptide
NFMLTQPHSVSESPGKTVTISCTRSSGSIASNYVQWYQQRPGSSPTTVIYEDNQRPSGVPDRFSGSIDSSSNSASLTISGLKTEDEADYYCQSYDSSNWVFGGGTKLTVLG

SEQ ID NO: 144 - protein, 117 aa, synthetic construct
  REGION 1..117: note = Description of Artificial Sequence: Synthetic polypeptide
EVQLVQSGAEVKKPGSSVKVSCKASGGTFSSYAISWVRQAPGQGLEWMGGIIPIFGTANYAQKFQGRVTITADESTSTAYMELSSLRSEDTAVYYCARSNYYYNDYWGQGTLVTVSS

SEQ ID NO: 145 - DNA, 336 bp, synthetic construct
  misc_feature 1..336: note = Description of Artificial Sequence: Synthetic polynucleotide
  source 1..336: mol_type = other DNA
cagtctgtgttgacgcagccgccctcagtgtctggggccccagggcagagggtcaccatctcctgcactgggagcagctccaacatcggggcaggttatgatgtacactggtaccagcagcttccaggaacagcccccaaactcctcatctatggtaacagcaatcggccctcaggggtccctgaccgattctctggctccaagtctggcacctcagcctccctggccatcactgggctccaggctgaggatgaggctgattattactgccagtcctatgacagcagcctgagtggttatgtcttcggaactgggaccaaggtcaccgtcctaggt

SEQ ID NO: 146 - DNA, 348 bp, synthetic construct
  misc_feature 1..348: note = Description of Artificial Sequence: Synthetic polynucleotide
  source 1..348: mol_type = other DNA
caggtgcagctggtgcagtctggggctgaggtgaagaagcctggggcctcagtgaaggtctcctgcaaggtttccggatacaccctcactgaattatccatgcactgggtgcgacaggctcctggaaaagggcttgagtggatgggaggttttgatcctgaagatggtgaaacaatctacgcacagaagttccagggcagagtcaccatgaccgaggacacatctacagacacagcctacatggagctgagcagcctgagatctgaggacactgccgtgtattactgtgcgcgctactctggtgtttactacgattggggtcaaggtactctggtgaccgtctcctca

SEQ ID NO: 147 - protein, 112 aa, synthetic construct
  REGION 1..112: note = Description of Artificial Sequence: Synthetic polypeptide
QSVLTQPPSVSGAPGQRVTISCTGSSSNIGAGYDVHWYQQLPGTAPKLLIYGNSNRPSGVPDRFSGSKSGTSASLAITGLQAEDEADYYCQSYDSSLSGYVFGTGTKVTVLG

SEQ ID NO: 148 - protein, 116 aa, synthetic construct
  REGION 1..116: note = Description of Artificial Sequence: Synthetic polypeptide
QVQLVQSGAEVKKPGASVKVSCKVSGYTLTELSMHWVRQAPGKGLEWMGGFDPEDGETIYAQKFQGRVTMTEDTSTDTAYMELSSLRSEDTAVYYCARYSGVYYDWGQGTLVTVSS

SEQ ID NO: 149 - DNA, 336 bp, synthetic construct
  misc_feature 1..336: note = Description of Artificial Sequence: Synthetic polynucleotide
  source 1..336: mol_type = other DNA
aattttatgctgactcagccccactctgtgtcggggtctccggggaagacggtaaccatctcctgcaccggcagcagtggcagcattgccgacaactttgtgcagtggtaccagcagcgcccgggcggtgtccccaccactgtgatctttaatgatgacgaaagaccctctggcgtccctgatcggttctctggctccatcgacacctcctccaattctgcctccctcaccatctctggactgaagactgaggacgaggctgactactactgtcagtcttatgataataataatcgaggggtgttcggcggagggaccaagctgaccgtcctaggt

SEQ ID NO: 150 - DNA, 348 bp, synthetic construct
  misc_feature 1..348: note = Description of Artificial Sequence: Synthetic polynucleotide
  source 1..348: mol_type = other DNA
caggtccagctggtgcagtctggggctgaggtgaagaagcctgggtcctcggtgaaggtctcctgcaaggcttctggaggcaccttcagcagctatgctatcagctgggtgcgacaggcccctggacaagggcttgagtggatgggatggatgaaccctaacagtggtaacacaggctatgcacagaagttccagggcagagtcaccatgaccaggaacacctccataagcacagcctacatggagctgagcaacctgagatctgaggacacggccgtgtattactgtgcgcgctactactcttacggttacgattggggtcaaggtactctggtgaccgtctcctca

SEQ ID NO: 151 - protein, 112 aa, synthetic construct
  REGION 1..112: note = Description of Artificial Sequence: Synthetic polypeptide
NFMLTQPHSVSGSPGKTVTISCTGSSGSIADNFVQWYQQRPGGVPTTVIFNDDERPSGVPDRFSGSIDTSSNSASLTISGLKTEDEADYYCQSYDNNNRGVFGGGTKLTVLG

SEQ ID NO: 152 - protein, 116 aa, synthetic construct
  REGION 1..116: note = Description of Artificial Sequence: Synthetic polypeptide
QVQLVQSGAEVKKPGSSVKVSCKASGGTFSSYAISWVRQAPGQGLEWMGWMNPNSGNTGYAQKFQGRVTMTRNTSISTAYMELSNLRSEDTAVYYCARYYSYGYDWGQGTLVTVSS

SEQ ID NO: 153 - DNA, 336 bp, synthetic construct
  misc_feature 1..336: note = Description of Artificial Sequence: Synthetic polynucleotide
  source 1..336: mol_type = other DNA
cagtctgtcgtgacgcagccgccctcagtgtctggggccccagggcagacggtcaccatctcctgcactgggggcagctccaacatcgggacaggttattttgtaaattggtaccagcaggttccaggaaaagcccccaaactcctcatcctgggtaacaataatcggccctcgggggtccctgaccgactctccggctccacgtccggcacctcagcctccctggccatcactgggctccaggctgaggatgagggtacttattactgccagtcctatgacagcagcctgagtggttatgtcttcggaactgggaccaaggtcaccgtcctaggt

SEQ ID NO: 154 - DNA, 366 bp, synthetic construct
  misc_feature 1..366: note = Description of Artificial Sequence: Synthetic polynucleotide
  source 1..366: mol_type = other DNA
caggtacagctgcagcagtcaggtccaggactggtgaagccctcgcagaccctctcactcacctgtggcatctccggggacagtgtctctaccaacagtgttgcttggcactggatcaggcagtccccatcgagaggccttgagtggctgggaaggacatactacaggtccaagtggtctaatgactatggagtatctgtgaaaagtcgaatcaccatcatcccagacacatccaagaaccagttctccctgcagctgaactctgtgactcccgaggacacggctgtgtattactgtgcgcgctcttcttcttggtaccagatcttcgattactggggtcaaggtactctggtgaccgtctcctca

SEQ ID NO: 155 - protein, 112 aa, synthetic construct
  REGION 1..112: note = Description of Artificial Sequence: Synthetic polypeptide
QSVVTQPPSVSGAPGQTVTISCTGGSSNIGTGYFVNWYQQVPGKAPKLLILGNNNRPSGVPDRLSGSTSGTSASLAITGLQAEDEGTYYCQSYDSSLSGYVFGTGTKVTVLG

SEQ ID NO: 156 - protein, 122 aa, synthetic construct
  REGION 1..122: note = Description of Artificial Sequence: Synthetic polypeptide
QVQLQQSGPGLVKPSQTLSLTCGISGDSVSTNSVAWHWIRQSPSRGLEWLGRTYYRSKWSNDYGVSVKSRITIIPDTSKNQFSLQLNSVTPEDTAVYYCARSSSWYQIFDYWGQGTLVTVSS

SEQ ID NO: 157 - DNA, 336 bp, synthetic construct
  misc_feature 1..336: note = Description of Artificial Sequence: Synthetic polynucleotide
  source 1..336: mol_type = other DNA
aattttatgctgactcagccccactctgtgtcggagtctccggggaagacggtaaccatctcctgcaccggcagcagcgacagcatagccaacaactatgttcagtggtaccagcagcgcccgggcagtgcccccaccaatgtgatctacgaagatgtccaaagaccctctggggtccctgatcggttctctgggtccatcgacagctcctccaactctgcctccctcaccatctctggactgaagactgaggacgaggctgtctactattgtcagtcttatcatagcgacaatcgttgggtgttcggcggcgggaccaagctgaccgtcctaggt

SEQ ID NO: 158 - DNA, 363 bp, synthetic construct
  misc_feature 1..363: note = Description of Artificial Sequence: Synthetic polynucleotide
  source 1..363: mol_type = other DNA
caggtgcagctggtggagtctgggggaggcttggtacagcctggggggtccctgagactctcctgtgcagcctctggattcacctttagcagctatgccatgagctgggtccgccaggctccagggaaggggctggagtgggtctcagctattagtggtagtggtggtagcacatactacgcagactccgtgaagggccggttcaccatctccagagacaattccaagaacacgctgtatctgcaaatgaacagcctgagagccgaggacacggccgtatattactgtgcgcgctctggtgcttactgggactactctgtttacgatgaatggggtcaaggtactctggtgaccgtctcctca

SEQ ID NO: 159 - protein, 112 aa, synthetic construct
  REGION 1..112: note = Description of Artificial Sequence: Synthetic polypeptide
NFMLTQPHSVSESPGKTVTISCTGSSDSIANNYVQWYQQRPGSAPTNVIYEDVQRPSGVPDRFSGSIDSSSNSASLTISGLKTEDEAVYYCQSYHSDNRWVFGGGTKLTVLG

SEQ ID NO: 160 - protein, 121 aa, synthetic construct
  REGION 1..121: note = Description of Artificial Sequence: Synthetic polypeptide
QVQLVESGGGLVQPGGSLRLSCAASGFTFSSYAMSWVRQAPGKGLEWVSAISGSGGSTYYADSVKGRFTISRDNSKNTLYLQMNSLRAEDTAVYYCARSGAYWDYSVYDEWGQGTLVTVSS

SEQ ID NO: 161 - DNA, 324 bp, synthetic construct
  misc_feature 1..324: note = Description of Artificial Sequence: Synthetic polynucleotide
  source 1..324: mol_type = other DNA
cagtctgtgttgactcagccaccctcagtgtccgtgtccccaggacagacagccaccatcgcctgttctggacataaattgggggataaatatgcttcctggtatcagcagaagtcgggccagtcccctgtgttgatcatctatcaggataataagcggccctcagggattcctgagcgattctctggctccaactctgggaacacagccactctgaccatcagcgggacccaggctctggatgaggctgactattattgtcaggcgtgggacagtagtacttatgtggcattcggcggagggaccaagctgaccgtcctaggt

SEQ ID NO: 162 - DNA, 357 bp, synthetic construct
  misc_feature 1..357: note = Description of Artificial Sequence: Synthetic polynucleotide
  source 1..357: mol_type = other DNA
caggtgcagctgcaggagtccggcccaggactggtgaagccttcggagaccctgtccctcacctgcgttgtctctggtggctccatcagcagtagtaactggtggagctgggtccgccagcccccagggaaggggctggagtggattggggaaatctatcatagtgggagccccaactacaacccatccctcaagagtcgagtcaccatatcagtagacaagtccaagaaccagttctccctgaagctgagctctgtgaccgccgcggacacggccgtgtattactgtgcgcgcatgactactcatactttcggttacgatgcttggggtcaaggtactctggtgaccgtctcctca

SEQ ID NO: 163 - protein, 108 aa, synthetic construct
  REGION 1..108: note = Description of Artificial Sequence: Synthetic polypeptide
QSVLTQPPSVSVSPGQTATIACSGHKLGDKYASWYQQKSGQSPVLIIYQDNKRPSGIPERFSGSNSGNTATLTISGTQALDEADYYCQAWDSSTYVAFGGGTKLTVLG

SEQ ID NO: 164 - protein, 119 aa, synthetic construct
  REGION 1..119: note = Description of Artificial Sequence: Synthetic polypeptide
QVQLQESGPGLVKPSETLSLTCVVSGGSISSSNWWSWVRQPPGKGLEWIGEIYHSGSPNYNPSLKSRVTISVDKSKNQFSLKLSSVTAADTAVYYCARMTTHTFGYDAWGQGTLVTVSS

SEQ ID NO: 165 - DNA, 327 bp, synthetic construct
  misc_feature 1..327: note = Description of Artificial Sequence: Synthetic polynucleotide
  source 1..327: mol_type = other DNA
cagcctgtgctgactcagccaccctcagtgtcagtggccccaggaaagacggccacgattacttgtgggggaaacaacattggaagtgaaagtgtgcactggtaccaccagaagccaggccaggcccctgtgttggtcatctatgatgatgccggccggccctcagggatccctgagcgattcactggctccaactctgggaacacggccaccctgaccatcagcagggtcgaagccggggatgaggccgactattactgtcaggtgtgggacagaaatagtgctcagtttgtcttcggacctgggaccaaggtcaccgtcctaggt

SEQ ID NO: 166 - DNA, 345 bp, synthetic construct
  misc_feature 1..345: note = Description of Artificial Sequence: Synthetic polynucleotide
  source 1..345: mol_type = other DNA
gaggtccagctggtgcagtctggagctgaggtgaagaagcctggggcctcagtgaaggtctcctgcaaggcttctggttacacctttaccagctatggtatcagctgggtgcgacaggcccctggacaagggcttgagtggatgggatggatcagcgcttacaatggtaacacaaactatgcacagaagctccagggcagagtcaccatgaccacagacacatccacgagcacagcctacatggagctgaggagcctgagatctgacgacacggccgtgtattactgtgcgcgcggtgttcatctggattggtggggtcaaggtactctggtgaccgtctcctca

SEQ ID NO: 167 - protein, 109 aa, synthetic construct
  REGION 1..109: note = Description of Artificial Sequence: Synthetic polypeptide
QPVLTQPPSVSVAPGKTATITCGGNNIGSESVHWYHQKPGQAPVLVIYDDAGRPSGIPERFTGSNSGNTATLTISRVEAGDEADYYCQVWDRNSAQFVFGPGTKVTVLG

SEQ ID NO: 168 - protein, 115 aa, synthetic construct
  REGION 1..115: note = Description of Artificial Sequence: Synthetic polypeptide
EVQLVQSGAEVKKPGASVKVSCKASGYTFTSYGISWVRQAPGQGLEWMGWISAYNGNTNYAQKLQGRVTMTTDTSTSTAYMELRSLRSDDTAVYYCARGVHLDWWGQGTLVTVSS

SEQ ID NO: 169 - DNA, 333 bp, synthetic construct
  misc_feature 1..333: note = Description of Artificial Sequence: Synthetic polynucleotide
  source 1..333: mol_type = other DNA
cagtctgtcgtgacgcagccaccctcagcgtctgggacccccgggcagagggtcaccatctcttgttctggaagcagctccaacatcggaagtaattatgtatactggtaccagcagctcccaggaacggcccccaaactcctcatctatagtaataatcagcggccctcaggggtccctgaccgattctctggctccaagtctggcacctcagcctccctggccatcagtgggctccggtccgaggatgaggctgattattactgtgcagcatgggatgacagcctgagtggttatgtcttcggaactgggaccaagctgaccgtcctaggt

SEQ ID NO: 170 - DNA, 375 bp, synthetic construct
  misc_feature 1..375: note = Description of Artificial Sequence: Synthetic polynucleotide
  source 1..375: mol_type = other DNA
caggtgcagctacagcagtggggcgcaggactgttgaagccttcggagaccctgtccctcacctgcgctgtctatggtgggtccttcagtggttactactggagctggatccgccagcccccagggaaggggctggagtggattggggaaatcaatcatagtggaagcaccaactacaacccgtccctcaagagtcgagtcaccatatcagtagacacgtccaagaaccagttctccctgaagctgagctctgtgaccgccgcggacacggccgtgtattactgtgcgcgcctgtacgaaggtggttaccatggttggggttcttggctgtcttctgattcttggggtcaaggtactctggtgaccgtctcctca

SEQ ID NO: 171 - protein, 111 aa, synthetic construct
  REGION 1..111: note = Description of Artificial Sequence: Synthetic polypeptide
QSVVTQPPSASGTPGQRVTISCSGSSSNIGSNYVYWYQQLPGTAPKLLIYSNNQRPSGVPDRFSGSKSGTSASLAISGLRSEDEADYYCAAWDDSLSGYVFGTGTKLTVLG

SEQ ID NO: 172 - protein, 125 aa, synthetic construct
  REGION 1..125: note = Description of Artificial Sequence: Synthetic polypeptide
QVQLQQWGAGLLKPSETLSLTCAVYGGSFSGYYWSWIRQPPGKGLEWIGEINHSGSTNYNPSLKSRVTISVDTSKNQFSLKLSSVTAADTAVYYCARLYEGGYHGWGSWLSSDSWGQGTLVTVSS

SEQ ID NO: 173 - DNA, 336 bp, synthetic construct
  misc_feature 1..336: note = Description of Artificial Sequence: Synthetic polynucleotide
  source 1..336: mol_type = other DNA
cagtctgtgttgactcagccaccctcagcgtctgggacccccgggcagagggtcaccatctcttgttctggaagcagctccaacatcggaagtaatactgtaaactggtaccagcagctcccaggaacggcccccaaactcctcatctatagtaataatcagcggccctcaggggtccctgaccgattctctggctccaagtctggcacctcagcctccctggccatcagtgggctccagtctgaggatgaggctgattattactgtgcagcatgggatgacagcctgaatggttattgggtgttcggcggagggaccaagctgaccgtcctaggt

SEQ ID NO: 174 - DNA, 351 bp, synthetic construct
  misc_feature 1..351: note = Description of Artificial Sequence: Synthetic polynucleotide
  source 1..351: mol_type = other DNA
caggtgcagctacagcagtggggcgcaggactgttgaagccttcggagaccctgtccctcacctgcgctgtctatggtgggtccttcagtggttactactggagctggatccgccagcccccagggaaggggctggagtggattggggaaatcaatcatagtggaagcaccaactacaacccgtccctcaagagtcgagtcaccatatcagtagacacgtccaagaaccagttctccctgaagctgagctctgtgaccgccgcggacacggctgtgtattactgtgcgcgcgaaggggcatttgatgcttttgatatctggggccaagggacaatggtcaccgtctcttca

SEQ ID NO: 175 - protein, 112 aa, synthetic construct
  REGION 1..112: note = Description of Artificial Sequence: Synthetic polypeptide
QSVLTQPPSASGTPGQRVTISCSGSSSNIGSNTVNWYQQLPGTAPKLLIYSNNQRPSGVPDRFSGSKSGTSASLAISGLQSEDEADYYCAAWDDSLNGYWVFGGGTKLTVLG

SEQ ID NO: 176 - protein, 116 aa, synthetic construct
  REGION 1..116: note = Description of Artificial Sequence: Synthetic polypeptide
QVQLQQWGAGLLKPSETLSLTCAVYGGSFSGYYWSWIRQPPGKGLEWIGEINHSGSTNYNPSLKSRVTISVDTSKNQFSLKLSSVTAADTAVYYCAREGAFDAFDIWGQGTMVTVS

SEQ ID NO: 177 - DNA, 333 bp, synthetic construct
  misc_feature 1..333: note = Description of Artificial Sequence: Synthetic polynucleotide
  source 1..333: mol_type = other DNA
tcctatgagctgactcagccaccctcagcgtctgggacccccgggcagagggtcaccatctcttgttctggaagcagctccaacatcggaagtaattatgtatactggtaccagcagctcccaggaacggcccccaaactcttcatctataggaataatcagcggccctcaggggtccctgaccgattctctggctccaagtctggcacctcagcctccctggccatcagtgggctccggtccgaggatgaggctgattattactgtgcagcatgggatgacagcctgagtggttatctcttcggaactgggaccaaggtcaccgtcctaggt

SEQ ID NO: 178 - DNA, 360 bp, synthetic construct
  misc_feature 1..360: note = Description of Artificial Sequence: Synthetic polynucleotide
  source 1..360: mol_type = other DNA
gaggtgcagctggtggagtctgggggaggcttggtacagcctggcaggtccctgagactctcctgtgcagcctctggattcacctttgatgattatgccatgcactgggtccggcaagctccagggaagggcctggagtgggtctcaggtattagttggaatagtggtagcataggctatgcggactctgtgaagggccgattcaccatctccagagacaacgccaagaactccctgtatctgcaaatgaacagtctgagagctgaggacacggccttgtattactgtgcaaatggcgactccaactactactacggtatggacgtctggggccaagggaccacggtcaccgtctcctca

SEQ ID NO: 179 - protein, 111 aa, synthetic construct
  REGION 1..111: note = Description of Artificial Sequence: Synthetic polypeptide
SYELTQPPSASGTPGQRVTISCSGSSSNIGSNYVYWYQQLPGTAPKLFIYRNNQRPSGVPDRFSGSKSGTSASLAISGLRSEDEADYYCAAWDDSLSGYLFGTGTKVTVLG

SEQ ID NO: 180 - protein, 120 aa, synthetic construct
  REGION 1..120: note = Description of Artificial Sequence: Synthetic polypeptide
EVQLVESGGGLVQPGRSLRLSCAASGFTFDDYAMHWVRQAPGKGLEWVSGISWNSGSIGYADSVKGRFTISRDNAKNSLYLQMNSLRAEDTALYYCANGDSNYYYGMDVWGQGTTVTVSS

SEQ ID NO: 181 - DNA, 336 bp, synthetic construct
  misc_feature 1..336: note = Description of Artificial Sequence: Synthetic polynucleotide
  source 1..336: mol_type = other DNA
cagtctgccctgactcagcctgcctccgtgtccgggtctcctggacagtcgatcaccatctcctgcactggaaccagcagtgacattggtggttataactatgtctcctggtaccaacaacacccaggcaaagcccccaaactcatgatttatgatgtcagtaatcggccctcaggggtttctaatcgcttctctggctccaagtctggcaacacggcctccctgaccatctctgggctccaggctgaggacgaggctgattattactgcatctcatatacacgcacctggaacccctatgtcttcgggagtgggaccaaggtcaccgtcctaggt

SEQ ID NO: 182 - DNA, 369 bp, synthetic construct
  misc_feature 1..369: note = Description of Artificial Sequence: Synthetic polynucleotide
  source 1..369: mol_type = other DNA
gaggtgcagctggtgcagtctgggggaggcgtggtacagcctggggggtccctgagactctcctgtgcagcctctggattcacctttgatgattatgccatgcactgggtccgtcaagctccagggaagggtctggagtgggtctctcttattagtggggatggtggtagcacatactatgcagactctgtgaagggccgattcaccatctccagagacaacagcaaaaactccctgtatctgcaaatgaacagtctgagaactgaggacaccgccttgtattactgtgcaaaagatcgggcagcagctggctactactactacggtatggacgtctggggccaagggaccacggtcaccgtctcctca

SEQ ID NO: 183 - protein, 112 aa, synthetic construct
  REGION 1..112: note = Description of Artificial Sequence: Synthetic polypeptide
QSALTQPASVSGSPGQSITISCTGTSSDIGGYNYVSWYQQHPGKAPKLMIYDVSNRPSGVSNRFSGSKSGNTASLTISGLQAEDEADYYCISYTRTWNPYVFGSGTKVTVLG

SEQ ID NO: 184 - protein, 123 aa, synthetic construct
  REGION 1..123: note = Description of Artificial Sequence: Synthetic polypeptide
EVQLVQSGGGVVQPGGSLRLSCAASGFTFDDYAMHWVRQAPGKGLEWVSLISGDGGSTYYADSVKGRFTISRDNSKNSLYLQMNSLRTEDTALYYCAKDRAAAGYYYYGMDVWGQGTTVTVSS

SEQ ID NO: 185 - DNA, 318 bp, synthetic construct
  misc_feature 1..318: note = Description of Artificial Sequence: Synthetic polynucleotide
  source 1..318: mol_type = other DNA
ctgcctgtgctgactcagccaccctcagtgtccgtgtccccaggacagacagccatcatcacctgctctggagataaattgggggaaaaatatgtttcctggtatcagcagaagccaggccagtcccctgtactggtcatcgatcaagataccaggaggccctcagggatccctgagcgattctctggctccaactctgggaccacagccactctgaccatcagcgggacccaggctatggatgaggctgactattactgtcaggcgtgggacaggggtgtggtattcggcggagggaccaagctgaccgtcctaggt

SEQ ID NO: 186 - DNA, 369 bp, synthetic construct
  misc_feature 1..369: note = Description of Artificial Sequence: Synthetic polynucleotide
  source 1..369: mol_type = other DNA
gaggtgcagctggtggagtctgggggagacttggtacagcctggcaggtccctgagactctcctgtgcagcctctggattcacctttaatgattatgccatgcactgggtccggcaagctccagggaagggcctggagtgggtctcaggtattagttggagtggtaataacataggctatgcggactctgtgaagggccgattcaccatctccagagacaacgccaagaactccctgtatctgcaaatgaacagtctgagagctgaggacacggccttgtattactgtgcaaaagatagtatacggtatggcatcacctggggaggttttgactactggggccagggaaccctggtcaccgtctcctca

SEQ ID NO: 187 - protein, 106 aa, synthetic construct
  REGION 1..106: note = Description of Artificial Sequence: Synthetic polypeptide
LPVLTQPPSVSVSPGQTAIITCSGDKLGEKYVSWYQQKPGQSPVLVIDQDTRRPSGIPERFSGSNSGTTATLTISGTQAMDEADYYCQAWDRGVVFGGGTKLTVLG

SEQ ID NO: 188 - protein, 123 aa, synthetic construct
  REGION 1..123: note = Description of Artificial Sequence: Synthetic polypeptide
EVQLVESGGDLVQPGRSLRLSCAASGFTFNDYAMHWVRQAPGKGLEWVSGISWSGNNIGYADSVKGRFTISRDNAKNSLYLQMNSLRAEDTALYYCAKDSIRYGITWGGFDYWGQGTLVTVSS

SEQ ID NO: 189 - DNA, 333 bp, synthetic construct
  misc_feature 1..333: note = Description of Artificial Sequence: Synthetic polynucleotide
  source 1..333: mol_type = other DNA
cagcctgtgctgactcagccaccctcggtgtccaagggcttgagacagaccgccacactcacctgcactgggaacagcaacaatgttggcaacctaggagtagcttggctgcagcagcaccagggccaccctcccaaactcctatcctacaggaataacaaccggccctcagggatctcagagagattatctgcatccaggtcaggaaacacagcctccctgaccattactggactccagcctgaggacgaggctgactattactgctcagcatgggacagtagcctcagtgcttgggtgttcggcggagggaccaagctgaccgtcctaggt

SEQ ID NO: 190 - DNA, 354 bp, synthetic construct
  misc_feature 1..354: note = Description of Artificial Sequence: Synthetic polynucleotide
  source 1..354: mol_type = other DNA
gaggtgcagctggtggagtctgggggagtcgtggtacagcctggggggtccctgagactctcctgtgcagcctctggattcacctttgatgattatgccatgcactgggtccgtcaagctccggggaagggtctggagtgggtctctcttattaattgggatggtggtagcacctactatgcagactctgtgaagggtcgattcaccatctccagagacaacagcaaaaactccctgtatctgcaaatgaacagtctgagagctgaggacaccgccttgtattactgtgcaaaagggatgggcctgagggcgtttgactactggggccagggaaccctggtcaccgtctcctca

SEQ ID NO: 191 - protein, 111 aa, synthetic construct
  REGION 1..111: note = Description of Artificial Sequence: Synthetic polypeptide
QPVLTQPPSVSKGLRQTATLTCTGNSNNVGNLGVAWLQQHQGHPPKLLSYRNNNRPSGISERLSASRSGNTASLTITGLQPEDEADYYCSAWDSSLSAWVFGGGTKLTVLG

SEQ ID NO: 192 - protein, 118 aa, synthetic construct
  REGION 1..118: note = Description of Artificial Sequence: Synthetic polypeptide
EVQLVESGGVVVQPGGSLRLSCAASGFTFDDYAMHWVRQAPGKGLEWVSLINWDGGSTYYADSVKGRFTISRDNSKNSLYLQMNSLRAEDTALYYCAKGMGLRAFDYWGQGTLVTVSS

SEQ ID NO: 193 - DNA, 336 bp, synthetic construct
  misc_feature 1..336: note = Description of Artificial Sequence: Synthetic polynucleotide
  source 1..336: mol_type = other DNA
cagtctgtgttgactcagccaccctcagcgtctgggacccccgggcagagggtcaccatctcctgttctggaagcagctccaacatcggaagtaatactgtaaactggtaccagcagctcccaggaacggcccccaaactcctcatctatagtaatgatcagcggccctcaggggtccctgaccgattctctggctccaagtccggcacctcagcctccctggccatcagtgggctccagtctgaggatgaggctgattattactgtgcttcatgggatgacagcctgaatggccgttatgtcttcggaactgggaccaaggtcaccgtcctaggt

SEQ ID NO: 194 - DNA, 366 bp, synthetic construct
  misc_feature 1..366: note = Description of Artificial Sequence: Synthetic polynucleotide
  source 1..366: mol_type = other DNA
caggtccagctggtacagtctggggctgaggtgaggaagcctggggcctcagtgaaggtttcctgcaagacttctggatacaccttcagttggtatgctatacattgggtgcgccaggcccccggacaaaggcttgagtggatgggatggatcaacgctggcaatggaaacacaaaatattcacagaaatttcagggcagagtcagtcttaccagggacacatccgcgagcacagcctacatggagctgagcagcctgagatctgatgacacggctgtgtattactgtgcgagacccgataattatggttcgggtggggatgtttttgatatctggggccaagggacaatggtcaccgtctcttca

SEQ ID NO: 195 - protein, 112 aa, synthetic construct
  REGION 1..112: note = Description of Artificial Sequence: Synthetic polypeptide
QSVLTQPPSASGTPGQRVTISCSGSSSNIGSNTVNWYQQLPGTAPKLLIYSNDQRPSGVPDRFSGSKSGTSASLAISGLQSEDEADYYCASWDDSLNGRYVFGTGTKVTVLG

SEQ ID NO: 196 - protein, 122 aa, synthetic construct
  REGION 1..122: note = Description of Artificial Sequence: Synthetic polypeptide
QVQLVQSGAEVRKPGASVKVSCKTSGYTFSWYAIHWVRQAPGQRLEWMGWINAGNGNTKYSQKFQGRVSLTRDTSASTAYMELSSLRSDDTAVYYCARPDNYGSGGDVFDIWGQGTMVTVSS

SEQ ID NO: 197 - DNA, 333 bp, synthetic construct
  misc_feature 1..333: note = Description of Artificial Sequence: Synthetic polynucleotide
  source 1..333: mol_type = other DNA
aattttatgctgactcagccccactctgtgtcggagtctccggggaagacggtaaccatctcctgcacccgcagcagtggcagcattgccagcaactttgtgcagtggtaccagcagcgcccgggcagtgcccccacccctatgatctatgaggataacaacagaccccctggggtccctgatcggttctctgcctccgtcgacagctcctccaactctgcctccctcaccatctctggactgaagactgaggacgaggctgactactactgtcagtcttatgataccagcaatgtggtattcggcggggggaccaagctgaccgtcctaggt

SEQ ID NO: 198 - DNA, 348 bp, synthetic construct
  misc_feature 1..348: note = Description of Artificial Sequence: Synthetic polynucleotide
  source 1..348: mol_type = other DNA
gaggtgcagctggtggagtctgggggaggcttggtacagcctggagggtccctgagactctcctgtgcagcctctggattcaccttcagtagttatgaaatgaactgggtccgccaggctccagggaaggggctggagtgggtttcatacattagtagtagtggtagtaccatatactacgcagactctgtgaagggccgattcaccatctccagagacaacgccaagaactcactgtatctgcaaatgaacagcctgagagccgaggacacggctgtttattactgtgcacgctgggactacggtatggacgtctggggccaagggaccacggtcaccgtctcctca

SEQ ID NO: 199 - protein, 111 aa, synthetic construct
  REGION 1..111: note = Description of Artificial Sequence: Synthetic polypeptide
NFMLTQPHSVSESPGKTVTISCTRSSGSIASNFVQWYQQRPGSAPTPMIYEDNNRPPGVPDRFSASVDSSSNSASLTISGLKTEDEADYYCQSYDTSNVVFGGGTKLTVLG

SEQ ID NO: 200 - protein, 116 aa, synthetic construct
  REGION 1..116: note = Description of Artificial Sequence: Synthetic polypeptide
EVQLVESGGGLVQPGGSLRLSCAASGFTFSSYEMNWVRQAPGKGLEWVSYISSSGSTIYYADSVKGRFTISRDNAKNSLYLQMNSLRAEDTAVYYCARWDYGMDVWGQGTTVTVSS

SEQ ID NO: 201 - DNA, 333 bp, synthetic construct
  misc_feature 1..333: note = Description of Artificial Sequence: Synthetic polynucleotide
  source 1..333: mol_type = other DNA
caggctgtgctgactcagccaccctcagcgtctggggcccccgggcagagggtcaccgtctcttgttctggaagcaactccaacatcggaagtaactacgttaactggtaccagcagttcccaggaacggcccccaaactcctcatgtatagtagtagtcagcggccctcaggggtccctgaccgattctctggctccaagtctggcacctcagcctccctggccatcagtgggctccactctgaggatgaggctgattattactgtgctacatgggatgacagcctgaatgcttgggtgttcggcggagggaccaagctgaccgtcctaggt

SEQ ID NO: 202 - DNA, 366 bp, synthetic construct
  misc_feature 1..366: note = Description of Artificial Sequence: Synthetic polynucleotide
  source 1..366: mol_type = other DNA
gaggtccagctggtgcagtctggggctgaggtgaggaagcctggggcctcagtgaaggtttcctgcaagacttctggatacaccttcacttggtatgctatacattgggtgcgccaggcccccggacaaaggcttgagtggatgggatggatcaacgctggcagtggaaacacaaaatattcacagaaatttcagggcagagtcacccttaccagggacacatccgcgagcacagcgtacatggagctgagcagcctgagatctgatgacacggctgtgtattactgtgcgagacccaataactatggttcgggtggggatgtttttgatatctggggccaagggacaatggtcaccgtctcttca

SEQ ID NO: 203 - protein, 111 aa, synthetic construct
  REGION 1..111: note = Description of Artificial Sequence: Synthetic polypeptide
QAVLTQPPSASGAPGQRVTVSCSGSNSNIGSNYVNWYQQFPGTAPKLLMYSSSQRPSGVPDRFSGSKSGTSASLAISGLHSEDEADYYCATWDDSLNAWVFGGGTKLTVLG

SEQ ID NO: 204 - protein, 122 aa, synthetic construct
  REGION 1..122: note = Description of Artificial Sequence: Synthetic polypeptide
EVQLVQSGAEVRKPGASVKVSCKTSGYTFTWYAIHWVRQAPGQRLEWMGWINAGSGNTKYSQKFQGRVTLTRDTSASTAYMELSSLRSDDTAVYYCARPNNYGSGGDVFDIWGQGTMVTVSS

SEQ ID NO: 205 - DNA, 333 bp, synthetic construct
  misc_feature 1..333: note = Description of Artificial Sequence: Synthetic polynucleotide
  source 1..333: mol_type = other DNA
cagtctgtcgtgacgcagccgccctcagtgtctgcggccccaggacagaaggtcaccatctcctgctctggaagcagctccaacattgggaataattatgtatcctggtaccagcagctcccaggaacagcccccaaactcctcatttatgacaataataagcgaccctcagggattcctgaccgattctctggctccaagtctggcacgtcagccaccctgggcatcaccggactccagactggggacgaggccgattattactgcggaacatgggatagcagcctgagtgcttatgtcttcggaactgggaccaaggtcaccgtcctaggt

SEQ ID NO: 206 - DNA, 363 bp, synthetic construct
  misc_feature 1..363: note = Description of Artificial Sequence: Synthetic polynucleotide
  source 1..363: mol_type = other DNA
caggtccagctggtgcagtctggggctgaggtgaagaagcctggggcctcagtgaaagtttcctgcaaggcttctggatacaccttcacgaactatgctctgcattgggtgcgccaggcccccggacaagggcttgagtggatggcatggatcaacggtggcaatggtaacacaaaatattcacagaacttccagggcagagtcaccattaccagggacacatccgcgagcacagcctatatggagctgagcagcctgagatctgaagacacggctgtgtattactgtgcgaaaccggaggaaacagctggaacaatccactttgactactggggccagggaaccccggtcaccgtctcctca

SEQ ID NO: 207 - protein, 111 aa, synthetic construct
  REGION 1..111: note = Description of Artificial Sequence: Synthetic polypeptide
QSVVTQPPSVSAAPGQKVTISCSGSSSNIGNNYVSWYQQLPGTAPKLLIYDNNKRPSGIPDRFSGSKSGTSATLGITGLQTGDEADYYCGTWDSSLSAYVFGTGTKVTVLG

SEQ ID NO: 208 - protein, 121 aa, synthetic construct
  REGION 1..121: note = Description of Artificial Sequence: Synthetic polypeptide
QVQLVQSGAEVKKPGASVKVSCKASGYTFTNYALHWVRQAPGQGLEWMAWINGGNGNTKYSQNFQGRVTITRDTSASTAYMELSSLRSEDTAVYYCAKPEETAGTIHFDYWGQGTPVTVSS

SEQ ID NO: 209 - DNA, 333 bp, synthetic construct
  misc_feature 1..333: note = Description of Artificial Sequence: Synthetic polynucleotide
  source 1..333: mol_type = other DNA
caggctgtgctgactcagccccactctgtgtcggagtctccggggaagacggtaaccatctcctgcacccgcagcagtggcagcattgccagcaactatgtgcagtggtaccagcagcgcccgggcagtgcccccaccactgtgatctatgaggataaccaaagaccctctggggtccctgatcggttctctggctccatcgacagctcctccaactctgcctccctcaccatctctggactgaagactgaggacgaggctgactactactgtcagtcttatgatagcaccatcacggtgttcggcggagggaccaagctgaccgtcctaggt

SEQ ID NO: 210 - DNA, 378 bp, synthetic construct
  misc_feature 1..378: note = Description of Artificial Sequence: Synthetic polynucleotide
  source 1..378: mol_type = other DNA
caggtccagctggtacagtctggggctgaggtgaagaagcctgggtcctcggtgaaggtctcctgcaaggcttctggaggcaccttcagcagctatgctatcagctgggtgcgacaggcccctggacaagggcttgagtggatgggagggatcatccctatctttggtacagcaaactacgcacagaagttccagggcagagtcacgattaccgcggacgaatccacgagcacagcctacatggagctgagcagcctgagatctgaggacacggccgtgtattactgtgcgggggagggttactatgatagtagtggttattccaacggtgatgcttttgatatctggggccaagggacaatggtcaccgtctcttca

SEQ ID NO: 211 - protein, 111 aa, synthetic construct
  REGION 1..111: note = Description of Artificial Sequence: Synthetic polypeptide
QAVLTQPHSVSESPGKTVTISCTRSSGSIASNYVQWYQQRPGSAPTTVIYEDNQRPSGVPDRFSGSIDSSSNSASLTISGLKTEDEADYYCQSYDSTITVFGGGTKLTVLG

SEQ ID NO: 212 - protein, 126 aa, synthetic construct
  REGION 1..126: note = Description of Artificial Sequence: Synthetic polypeptide
QVQLVQSGAEVKKPGSSVKVSCKASGGTFSSYAISWVRQAPGQGLEWMGGIIPIFGTANYAQKFQGRVTITADESTSTAYMELSSLRSEDTAVYYCAGEGYYDSSGYSNGDAFDIWGQGTMVTVSS

SEQ ID NO: 213 - DNA, 333 bp, synthetic construct
  misc_feature 1..333: note = Description of Artificial Sequence: Synthetic polynucleotide
  source 1..333: mol_type = other DNA
aattttatgctgactcagccccactctgtgtcggagtctccggggaagacggtaaccatctcctgcacccgcagcagtggcagcattgccagcaactatgtgcagtggtaccagcagcgcccgggcagtgcccccaccactgtgatctatgaggataaccaaagaccctctggggtccctgatcggttctctggctccatcgacagctcctccaactctgcctccctcaccatctctggactgaagactgaggacgaggctgactactactgtcagtcttatgatagcagcaatgtggtattcggcggagggaccaaggtcaccgtcctaggt

SEQ ID NO: 214 - DNA, 348 bp, synthetic construct; identical to SEQ ID NO: 198
  misc_feature 1..348: note = Description of Artificial Sequence: Synthetic polynucleotide
  source 1..348: mol_type = other DNA

SEQ ID NO: 215 - protein, 111 aa, synthetic construct
  REGION 1..111: note = Description of Artificial Sequence: Synthetic polypeptide
NFMLTQPHSVSESPGKTVTISCTRSSGSIASNYVQWYQQRPGSAPTTVIYEDNQRPSGVPDRFSGSIDSSSNSASLTISGLKTEDEADYYCQSYDSSNVVFGGGTKVTVLG

SEQ ID NO: 216 - protein, 116 aa, synthetic construct; identical to SEQ ID NO: 200
  REGION 1..116: note = Description of Artificial Sequence: Synthetic polypeptide

SEQ ID NO: 217 - DNA, 321 bp, synthetic construct
  misc_feature 1..321: note = Description of Artificial Sequence: Synthetic polynucleotide
  source 1..321: mol_type = other DNA
tcctatgtgctgactcagccaccctcagtgtccgtgtccccaggacagacagccagcatcacctgctctggagatagattgacgaataaatatgtttcctggtatcaacagaagccaggccagtcccctgtgttggtcatctatgaggatgccaagcggccctcagggatccctgcgcgattctctggctccaactctgggaacacagccactctgaccatcagcgggacccaggctatggatgagtctgaatattactgtcaggcgtgggacagcagtgtggtggtttttggcggagggaccaagctgaccgtcctaggt

SEQ ID NO: 218 - DNA, 369 bp, synthetic construct
  misc_feature 1..369: note = Description of Artificial Sequence: Synthetic polynucleotide
  source 1..369: mol_type = other DNA
gaggtgcagctggtggagtctgggggaggcttggtacagcctggcaggtccctgagactctcctgtgcagcctctggatttacctttgatgattatgccatgcactgggtccggcaagctccagggaagggcctggagtgggtctcaggtattagttggaatagtggtagtataggctatgcggactctgtgaagggccgattcaccatctccagagacaacgccaagaactccctgtatctgcaaatgaacagtctgagagatgaggacacggccttgtattactgtgcaaaagaccgaggggggggagttatcgttaaggatgcttttgatatctggggccaagggacaatggtcaccgtctcttca

SEQ ID NO: 219 - protein, 107 aa, synthetic construct
  REGION 1..107: note = Description of Artificial Sequence: Synthetic polypeptide
SYVLTQPPSVSVSPGQTASITCSGDRLTNKYVSWYQQKPGQSPVLVIYEDAKRPSGIPARFSGSNSGNTATLTISGTQAMDESEYYCQAWDSSVVVFGGGTKLTVLG

SEQ ID NO: 220 - protein, 123 aa, synthetic construct
  REGION 1..123: note = Description of Artificial Sequence: Synthetic polypeptide
EVQLVESGGGLVQPGRSLRLSCAASGFTFDDYAMHWVRQAPGKGLEWVSGISWNSGSIGYADSVKGRFTISRDNAKNSLYLQMNSLRDEDTALYYCAKDRGGGVIVKDAFDIWGQGTMVTVSS

SEQ ID NO: 221 - DNA, 333 bp, synthetic construct
  misc_feature 1..333: note = Description of Artificial Sequence: Synthetic polynucleotide
  source 1..333: mol_type = other DNA
tcctatgagctgactcagccacccgcagcgtctgggacccccggacagagagtcaccatctcttgttctgggggcgtctccaacatcgggagtggtgctctaaattggtaccagcaactcccaggaacggcccccaaactcctcatctatagttacaatcagcggccctcaggggtctctgaccgattctctggctccaggtctgccacctcagcctccctggccatcagtgggctccagtctgaggatgaggctgattattactgtgcaacctgggatgatagtgtgaatggttgggtgttcggcggagggaccaagctgaccgtcctaggt

SEQ ID NO: 222 - DNA, 354 bp, synthetic construct
  misc_feature 1..354: note = Description of Artificial Sequence: Synthetic polynucleotide
  source 1..354: mol_type = other DNA
gaggtgcagctggtggagtctggagctgaggtgaagaagcctggggattcagtgaaggtctcctgcaagccttctggttacaattttctcaactatggtatcaactgggtgcgacaggcccctggacaagggcttgagtggatgggatggattagcacttacaccggtaacacaaactatgcacagaagctgcagggcagagtcaccttcaccacagacacatccacgagcacagcctacatggagatgaggagcctgagatctgacgacacggccgtgtattactgtgcgcgccagcagggtggtggttggtacgatgtttggggtcaaggtactctggtcaccgtctcctca

SEQ ID NO: 223 - protein, 111 aa, synthetic construct
  REGION 1..111: note = Description of Artificial Sequence: Synthetic polypeptide
SYELTQPPAASGTPGQRVTISCSGGVSNIGSGALNWYQQLPGTAPKLLIYSYNQRPSGVSDRFSGSRSATSASLAISGLQSEDEADYYCATWDDSVNGWVFGGGTKLTVLG

SEQ ID NO: 224 - protein, 118 aa, synthetic construct
  REGION 1..118: note = Description of Artificial Sequence: Synthetic polypeptide
EVQLVESGAEVKKPGDSVKVSCKPSGYNFLNYGINWVRQAPGQGLEWMGWISTYTGNTNYAQKLQGRVTFTTDTSTSTAYMEMRSLRSDDTAVYYCARQQGGGWYDVWGQGTLVTVSS

SEQ ID NO: 225 - DNA, 336 bp, synthetic construct
  misc_feature 1..336: note = Description of Artificial Sequence: Synthetic polynucleotide
  source 1..336: mol_type = other DNA
cagtctgtcgtgacgcagccgccctcagtgtctgcggccccaggagagaaggtcaccatctcctgctctggaagcaacttcaatgttggaaataatgatgtatcctggtatcagcaactcccaggtgcagcccccaaactcctcatttatgacaataataagcgaccctcagggattcctgaccgattctctggctccaagtctggcacgtcagccaccctggacatcaccgggctccacagtgacgacgaggccgattattactgcggaacatgggatagcagcctgaatactgggggggtcttcggaactgggaccaaggtcaccgtcctaggt

SEQ ID NO: 226 - DNA, 369 bp, synthetic construct
  misc_feature 1..369: note = Description of Artificial Sequence: Synthetic polynucleotide
  source 1..369: mol_type = other DNA
gaggtccagctggtgcagtctggagctgaggtgaagaagcctggggcctcagtgaaggtctcctgcaaggcttctggttacacctttaccagctatactatcagctgggtacgacaggcccctggacaagggcttgagtggatgggatggatcagcacttacaatggtctcacaaactatgcacagaacctccagggcagagtcaccatgactacagacacattcacgaccacagcctacatggagctgaggagcctcagatctgacgacacggccgtgtattactgtgtgagagaggggtcccccgactacggtgacttcgcgtcctttgactactggggccagggaaccctggtcaccgtctcctca

SEQ ID NO: 227 - protein, 112 aa, synthetic construct
  REGION 1..112: note = Description of Artificial Sequence: Synthetic polypeptide
QSVVTQPPSVSAAPGEKVTISCSGSNFNVGNNDVSWYQQLPGAAPKLLIYDNNKRPSGIPDRFSGSKSGTSATLDITGLHSDDEADYYCGTWDSSLNTGGVFGTGTKVTVLG

SEQ ID NO: 228 - protein, 123 aa, synthetic construct
  REGION 1..123: note = Description of Artificial Sequence: Synthetic polypeptide
EVQLVQSGAEVKKPGASVKVSCKASGYTFTSYTISWVRQAPGQGLEWMGWISTYNGLTNYAQNLQGRVTMTTDTFTTTAYMELRSLRSDDTAVYYCVREGSPDYGDFASFDYWGQGTLVTVSS

SEQ ID NO: 229 - DNA, 336 bp, synthetic construct
  misc_feature 1..336: note = Description of Artificial Sequence: Synthetic polynucleotide
  source 1..336: mol_type = other DNA
cagtctgtgttgacgcagccgccctcagtgtctgcgcccccgggacagaaggtcaccatctcctgctctggaagcagctccaacattgggaataattatgtatcctggtaccagcagttcccaggaacagcccccaaactcctcatttatgacaataataagcgaccctcagggatttctgaccgattctctggctccaagtctggcacgtcagccaccctgggcatcgccggactccagactggggacgaggccgattattactgcggaacatgggataccagcctgagtggtttttatgtcttcggaagtgggaccaaggtcaccgtcctaggt

SEQ ID NO: 230 - DNA, 369 bp, synthetic construct
  misc_feature 1..369: note = Description of Artificial Sequence: Synthetic polynucleotide
  source 1..369: mol_type = other DNA
gaggtccagctggtacagtctggagctgaggtgaagaagcctggggcctcagtgaaggtctcctgcaaggcttctggttacacctttaccagctatactatcagctgggtacgacaggcccctggacaagggcttgagtggatgggatggatcagcacttacaatggtctcacaaactatgcacagaacctccagggcagagtcaccatgactacagacacattcacgaccacagcctacatggagctgaggagcctcagatctgacgacacggccgtgtattactgtgtgagagaggggtcccccgactacggtgacttcgcgtcctttgactactggggccagggaaccctggtcaccgtctcctca

SEQ ID NO: 231 - protein, 112 aa, synthetic construct
  REGION 1..112: note = Description of Artificial Sequence: Synthetic polypeptide
QSVLTQPPSVSAPPGQKVTISCSGSSSNIGNNYVSWYQQFPGTAPKLLIYDNNKRPSGISDRFSGSKSGTSATLGIAGLQTGDEADYYCGTWDTSLSGFYVFGSGTKVTVLG

SEQ ID NO: 232 - protein, 123 aa, synthetic construct; identical to SEQ ID NO: 228
  REGION 1..123: note = Description of Artificial Sequence: Synthetic polypeptide

SEQ ID NO: 233 - DNA, 333 bp, synthetic construct
  misc_feature 1..333: note = Description of Artificial Sequence: Synthetic polynucleotide
  source 1..333: mol_type = other DNA
ctgcctgtgctgactcagccaccctcagcgtctgcgacccccgggcagagggtcaccatctcttgttctggaaccacctccaacatcggaagtaatactgtacactggtaccagcagctcccagggacggcccccaaactcctcatctataataataatcagcggccctcaggggtccctgaccgattctctggctccaagtctggcacctcagcctccctggccatcagtgggctccggtccgaggatgaggctacatattcctgtgcaacatgggatgacagcctgagtggtgtggtcttcggcggagggaccaagctgaccgtcctaggt

SEQ ID NO: 234 - DNA, 369 bp, synthetic construct
  misc_feature 1..369: note = Description of Artificial Sequence: Synthetic polynucleotide
  source 1..369: mol_type = other DNA
gaggtccagctggtgcagtctggggctgaggtgaagaagcctgggtcctcggtgaaggtctcctgcaaggcttctggaggcaccttcagcagctatgctatcagctgggtgcgacaggcccctggacaagggcttgagtggatgggagggatcatccctatctttggtacagcaaactacgcacagaagttccagggcagagtcacgattaccgcggacgaatccacgagcacagcctacatggagctgagcagcctgagatctgaggacacggccgtgtattactgtgcgagagatcccgcctacggtgactacgagtatgatgcttttgatatctggggccaagggacaatggtcaccgtctcttca

SEQ ID NO: 235 - protein, 111 aa, synthetic construct
  REGION 1..111: note = Description of Artificial Sequence: Synthetic polypeptide
LPVLTQPPSASATPGQRVTISCSGTTSNIGSNTVHWYQQLPGTAPKLLIYNNNQRPSGVPDRFSGSKSGTSASLAISGLRSEDEATYSCATWDDSLSGVVFGGGTKLTVLG

SEQ ID NO: 236 - protein, 123 aa, synthetic construct
  REGION 1..123: note = Description of Artificial Sequence: Synthetic polypeptide
EVQLVQSGAEVKKPGSSVKVSCKASGGTFSSYAISWVRQAPGQGLEWMGGIIPIFGTANYAQKFQGRVTITADESTSTAYMELSSLRSEDTAVYYCARDPAYGDYEYDAFDIWGQGTMVTVSS

SEQ ID NO: 237 - DNA, 333 bp, synthetic construct
  misc_feature 1..333: note = Description of Artificial Sequence: Synthetic polynucleotide
  source 1..333: mol_type = other DNA
cagtctgtgttgacgcagccgccctcagcgtctgggacccccgggcagagggtcaccatctcttgttctggaagcagctccaacatcggaactaatggtgtaaactggttccagcagttcccaggaacggcccccaaactcctcatctatactaatgatcagcggccctcaggggtccctgaccgattctctggctccaagtctggcacctcagcctccctggccatcagtgggctccagtctgcggatgaggctgattattactgtgcagtgtgggaccacagcctgaatggtccggtgttcggcggagggaccaagctgaccgtcctaggt

SEQ ID NO: 238 - DNA, 354 bp, synthetic construct
  misc_feature 1..354: note = Description of Artificial Sequence: Synthetic polynucleotide
  source 1..354: mol_type = other DNA
caggtgcagctggtgcagtctggggctgaggtgaagaagcctgggtcctcggtgaaggtctcctgcaaggcttctggaggcaccttcagcagctatgctatcagctgggtgcgacaggcccctggacaagggcttgagtggatgggagggatcatccctatctttggtacagcaaactacgcacagaagttccagggcagagtcacgattaccgcggacgaatccacgagcacagcctacatggagctgagcagcctgagatctgaggacacggccgtgtattactgtgcgagaggggccggttttgatgcttttgatatctggggccaagggacaatggtcaccgtctcttca

SEQ ID NO: 239 - protein, 111 aa, synthetic construct
  REGION 1..111: note = Description of Artificial Sequence: Synthetic polypeptide
QSVLTQPPSASGTPGQRVTISCSGSSSNIGTNGVNWFQQFPGTAPKLLIYTNDQRPSGVPDRFSGSKSGTSASLAISGLQSADEADYYCAVWDHSLNGPVFGGGTKLTVLG

SEQ ID NO: 240 - protein, 118 aa, synthetic construct
  REGION 1..118: note = Description of Artificial Sequence: Synthetic polypeptide
QVQLVQSGAEVKKPGSSVKVSCKASGGTFSSYAISWVRQAPGQGLEWMGGIIPIFGTANYAQKFQGRVTITADESTSTAYMELSSLRSEDTAVYYCARGAGFDAFDIWGQGTMVTVSS

SEQ ID NO: 241 - DNA, 333 bp, synthetic construct
  misc_feature 1..333: note = Description of Artificial Sequence: Synthetic polynucleotide
  source 1..333: mol_type = other DNA
caggctgtgctgactcagccaccctcagcgtctgggacccccgggcagagggtcaccatctcttgttctggaagcagctccaacatcggaagtaatactgtaaactggtaccagcagctcccaggaacggcccccaaactcctcatctatagtaataatcagcggccctcaggggtccctgaccgattctctggctccaagtctggcacctcagcctccctggccatcagtgggctccagtctgaggatgagactgattattactgtgcagcatgggatgacagcctgaatggttatgtcttcggaactgggaccaaggtcaccgtcctaggt

SEQ ID NO: 242 - DNA, 348 bp, synthetic construct
  misc_feature 1..348: note = Description of Artificial Sequence: Synthetic polynucleotide
  source 1..348: mol_type = other DNA
caggtgcagctacagcagtggggcgcaggactgttgaagccttcggagaccctgtccctcacctgcgctgtctatggtgggtccttcagtggttactactggagctggatccgccagcccccagggaaggggctggagtggattggggaaatcaatcatagtggaagcaccaactacaacccgtccctcaagagtcgagtcaccatatcagtagacacgtccaagaaccagttctccctgaagctgagctctgtgaccgccgcggacacggctgtgtattactgtgcgagagaggggctagatgcttttgatatctggggccaagggacaatggtcaccgtctcttca

SEQ ID NO: 243 - protein, 111 aa, synthetic construct
  REGION 1..111: note = Description of Artificial Sequence: Synthetic polypeptide
QAVLTQPPSASGTPGQRVTISCSGSSSNIGSNTVNWYQQLPGTAPKLLIYSNNQRPSGVPDRFSGSKSGTSASLAISGLQSEDETDYYCAAWDDSLNGYVFGTGTKVTVLG

SEQ ID NO: 244 - protein, 116 aa, synthetic construct
  REGION 1..116: note = Description of Artificial Sequence: Synthetic polypeptide
QVQLQQWGAGLLKPSETLSLTCAVYGGSFSGYYWSWIRQPPGKGLEWIGEINHSGSTNYNPSLKSRVTISVDTSKNQFSLKLSSVTAADTAVYYCAREGLDAFDIWGQGTMVTVSS

SEQ ID NO: 245 - DNA, 333 bp, synthetic construct
  misc_feature 1..333: note = Description of Artificial Sequence: Synthetic polynucleotide
  source 1..333: mol_type = other DNA
caggctgtgctgactcagccaccctcagcgtctgggacccccgggcagagggtcaccatctcttgttctggaagcagctccaacatcggaagtaatactgtaaactggtaccagcagctcccaggaacggcccccaaactcctcatgtatagtaatgatcagcggccctcaggggtccctgaccgattctctggctccaagtctggcacctcagcctccctggccatcagtgggctccagtctgaggatgaggctgattattattgtgcagcatgggatgacagcctgaatggttatgtcttcgcagctgggacccagctcaccgttttaagt

SEQ ID NO: 246 - DNA, 348 bp, synthetic construct; identical to SEQ ID NO: 242
  misc_feature 1..348: note = Description of Artificial Sequence: Synthetic polynucleotide
  source 1..348: mol_type = other DNA

SEQ ID NO: 247 - protein, 111 aa, synthetic construct
  REGION 1..111: note = Description of Artificial Sequence: Synthetic polypeptide
QAVLTQPPSASGTPGQRVTISCSGSSSNIGSNTVNWYQQLPGTAPKLLMYSNDQRPSGVPDRFSGSKSGTSASLAISGLQSEDEADYYCAAWDDSLNGYVFAAGTQLTVLS

SEQ ID NO: 248 - protein, 116 aa, synthetic construct; identical to SEQ ID NO: 244
  REGION 1..116: note = Description of Artificial Sequence: Synthetic polypeptide

SEQ ID NO: 249 - DNA, 336 bp, synthetic construct
  misc_feature 1..336: note = Description of Artificial Sequence: Synthetic polynucleotide
  source 1..336: mol_type = other DNA
cagtctgtcgtgacgcagccgccctcagtgtctgcggccccaggacagaaggtcaccatctcctgctctggaagcagctccaacattgggaataattatgtatcctggtaccagcagctcccaggaacagcccccaaactcctcatttatgacaataataagcgaccctcagggattcctgaccgattctctggctccaagtctggcacgtcagccaccctgggcatcactggactccagactggggacgaggccgattattactgcggaacatgggatagcagcctgagtgctgcttatgtcttcggaactgggaccaaggtcaccgtcctaggt

SEQ ID NO: 250 - DNA, 369 bp, synthetic construct
  misc_feature 1..369: note = Description of Artificial Sequence: Synthetic polynucleotide
  source 1..369: mol_type = other DNA
caggtccagctggtacagtctggagctgaggtgaagaagcctggggcctcagtgaaggtctcctgcaaggcttctggttacagctttaccagctatactatcagctgggttcgacaggcccctggacaaggccttgagtggatgggatgggtcagcacttacaatggtctcagaaactatgcacagaacctccagggcagagtcaccatgactacagacacactcacgaccacagcctacatggagctgaggagcctcagatctgacgacacggccgtgtattattgtgtgagagaggggtcccccgactacggtgacttcgcggcctttgactactggggccagggcaccctggtcaccgtctcctca

SEQ ID NO: 251 - protein, 112 aa, synthetic construct
  REGION 1..112: note = Description of Artificial Sequence: Synthetic polypeptide
QSVVTQPPSVSAAPGQKVTISCSGSSSNIGNNYVSWYQQLPGTAPKLLIYDNNKRPSGIPDRFSGSKSGTSATLGITGLQTGDEADYYCGTWDSSLSAAYVFGTGTKVTVLG

SEQ ID NO: 252 - protein, 123 aa, synthetic construct
  REGION 1..123: note = Description of Artificial Sequence: Synthetic polypeptide
QVQLVQSGAEVKKPGASVKVSCKASGYSFTSYTISWVRQAPGQGLEWMGWVSTYNGLRNYAQNLQGRVTMTTDTLTTTAYMELRSLRSDDTAVYYCVREGSPDYGDFAAFDYWGQGTLVTVSS

SEQ ID NO: 253 - DNA, 330 bp, synthetic construct
  misc_feature 1..330: note = Description of Artificial Sequence: Synthetic polynucleotide
  source 1..330: mol_type = other DNA
caggctgtgctgactcagccaccctcagcgtctgagacccccgggcagagggtcaccatctcttgttctggaagcaggtccaacatcggaactaatattgtacactggtaccagcagcgcccaggaatggcccccaaactcctcacttatggtagtcggcggccctcaggggtcccggaccgattctctggctccaagtttggcacctcagcctccctggccatcagtgggctccagtctgaggatgaggctgattattattgtgcagcatgggatgacagtctgaatggtccggctttcggcggagggaccaagctgaccgtcctaggt

SEQ ID NO: 254 - DNA, 348 bp, synthetic construct
  misc_feature 1..348: note = Description of Artificial Sequence: Synthetic polynucleotide
  source 1..348: mol_type = other DNA
caggtgcagctacagcagtggggcgcaggactgttgaagccttcggagaccctgtccctcacctgcgctgtctatggtgggtccttcagtggttactactggagctggatccgccagcccccagggaaggggctggagtggattggggaaatcaatcatagtggaagcaccaactacaacccgtccctcaagagtcgagtcaccatatcagtagacacgtccaagaaccagttctccctgaagctgagctctgtgaccgccgcggacacggctgtgtattactgtgcgagagacggtgggggctactttgactactggggccagggaaccctggtcaccgtctcctca

SEQ ID NO: 255 - protein, 110 aa, synthetic construct
  REGION 1..110: note = Description of Artificial Sequence: Synthetic polypeptide
QAVLTQPPSASETPGQRVTISCSGSRSNIGTNIVHWYQQRPGMAPKLLTYGSRRPSGVPDRFSGSKFGTSASLAISGLQSEDEADYYCAAWDDSLNGPAFGGGTKLTVLG

SEQ ID NO: 256 - protein, 116 aa, synthetic construct
  REGION 1..116: note = Description of Artificial Sequence: Synthetic polypeptide
QVQLQQWGAGLLKPSETLSLTCAVYGGSFSGYYWSWIRQPPGKGLEWIGEINHSGSTNYNPSLKSRVTISVDTSKNQFSLKLSSVTAADTAVYYCARDGGGYFDYWGQGTLVTVSS

SEQ ID NO: 257 - DNA, 336 bp, synthetic construct
  misc_feature 1..336: note = Description of Artificial Sequence: Synthetic polynucleotide
  source 1..336: mol_type = other DNA
cagtctgtgttgacgcagccgccctcagtgtctggggccccagggcagagggtcaccatctcctgcactgggagcagctccaatatcggggcacgttatgatgtacactggtaccagcaactcccaggaacagccccccgactcctcatctctgctaactacgatcggccctcaggggtccctgaccgattctctggctccaagtctggcacctcagcctccctggccatcactgggctccaggctgaggatgaggctgattattactgccagtcctatgacagcagtgtgagtgcttgggtgttcggcggagggaccaaggtcaccgtcctaggt

SEQ ID NO: 258 - DNA, 363 bp, synthetic construct
  misc_feature 1..363: note = Description of Artificial Sequence: Synthetic polynucleotide
  source 1..363: mol_type = other DNA
gaagtgcagctggtgcagtctggggctgaagtgaaggagcctggggcctcagtgaggatctcctgccaggcatctggatacaacttcatcagttattatatgcactgggtgcggcaggcccctgggcaaggtcttgagtggatgggcaccatcaacccaggcagtggtgagacagactactcacagaagttgcagggcagagtcaccatgaccagggacccgtccacgggtacattcgacatggggctgagcagcctgacatctggggacacggccgtctattattgtgcgacaggtctcatcagaggagctagcgatgcttttaatatctggggccgggggacaatggtcaccgtctcttca

SEQ ID NO: 259 - protein, 112 aa, synthetic construct
  REGION 1..112: note = Description of Artificial Sequence: Synthetic polypeptide
QSVLTQPPSVSGAPGQRVTISCTGSSSNIGARYDVHWYQQLPGTAPRLLISANYDRPSGVPDRFSGSKSGTSASLAITGLQAEDEADYYCQSYDSSVSAWVFGGGTKVTVLG

SEQ ID NO: 260 - protein, 121 aa, synthetic construct
  REGION 1..121: note = Description of Artificial Sequence: Synthetic polypeptide
EVQLVQSGAEVKEPGASVRISCQASGYNFISYYMHWVRQAPGQGLEWMGTINPGSGETDYSQKLQGRVTMTRDPSTGTFDMGLSSLTSGDTAVYYCATGLIRGASDAFNIWGRGTMVTVSS

SEQ ID NO: 261 - DNA, 321 bp, synthetic construct
  misc_feature 1..321: note = Description of Artificial Sequence: Synthetic polynucleotide
  source 1..321: mol_type = other DNA
cagcctgtgctgactcagccaccctcagtgtccgtgtccccaggacagacggccgccatcccctgttctggagataagttgggggataaatttgcttcctggtatcagcagaagccaggccagtcccctgtgctggtcatctatcaagatactaagcggccctcagggatccctgagcgattctctggctccaactctgggaacacagccactctgaccatcagcgggacccaggctatggatgaggctgactattactgtcagacgtgggccagcggcattgtggtgttcggcggagggaccaagctgaccgtcctaggt

SEQ ID NO: 262 - DNA, 366 bp, synthetic construct
  misc_feature 1..366: note = Description of Artificial Sequence: Synthetic polynucleotide
  source 1..366: mol_type = other DNA
caggtacagctgcagcagtcaggtccaggactggtgaagccctcgcagaccctctcactcacctgtgccatctccggggacagtgtctctagcaacagtgctgcttggaactggatcaggcagtccccatcgagaggccttgagtggctgggaaggacatactacaggtccaagtggtataatgattatgcagtatctgtgaaaagtcgaataaccatcaacccagacacatccaagaaccagttctccctgcagctgaactctgtgactcccgaggacacggctgtgtattactgtgcaagagagcgcagtggctggaagggatttgactactggggccagggaaccctggtcaccgtctcctca

SEQ ID NO: 263 - protein, 107 aa, synthetic construct
  REGION 1..107: note = Description of Artificial Sequence: Synthetic polypeptide
QPVLTQPPSVSVSPGQTAAIPCSGDKLGDKFASWYQQKPGQSPVLVIYQDTKRPSGIPERFSGSNSGNTATLTISGTQAMDEADYYCQTWASGIVVFGGGTKLTVLG

SEQ ID NO: 264 - protein, 122 aa, synthetic construct
  REGION 1..122: note = Description of Artificial Sequence: Synthetic polypeptide
QVQLQQSGPGLVKPSQTLSLTCAISGDSVSSNSAAWNWIRQSPSRGLEWLGRTYYRSKWYNDYAVSVKSRITINPDTSKNQFSLQLNSVTPEDTAVYYCARERSGWKGFDYWGQGTLVTVSS

SEQ ID NO: 265 - DNA, 339 bp, synthetic construct
  misc_feature 1..339: note = Description of Artificial Sequence: Synthetic polynucleotide
  source 1..339: mol_type = other DNA
gatgttgtgatgactcagtctccaccctccctgtccgtcacccctggagagccggcctccatcacctgcaggtctagtcagagcctcctggaaagaaatgcatacaactacttggattggtacctgcagaggccaggacagtctccacagctcctgatctacttgggttctaatcgggccgccggggtccctgacaggttcagtggcagtggatcaggcagagattttacactgaaaatcagcagagtggagcctgaggatgttggggtttattactgcatgcaagctctacaagctccgttcactttcggcggagggaccaaggtggagatcaaacgt

SEQ ID NO: 266 - DNA, 357 bp, synthetic construct
  misc_feature 1..357: note = Description of Artificial Sequence: Synthetic polynucleotide
  source 1..357: mol_type = other DNA
gaagtgcagctggtgcagtctgggggaggcttggtacagcctggggggtccctgagactctcctgtgcagcctctggattcacctttagcagctatgccatgagctgggtccgccaggctccagggaaggggctggagtgggtctcagctattagtggtagtggtggtagcacatactacgcagactccgtgaagggccggttcaccatctccagagacaattccaagaacacgctgtatctgcaaatgaacagcctgagagccgaggacacggccgtatattactgtgcgaaatggggcccgtttcaggatgcttttgatatctggggccaagggacaatggtcaccgtctcttca

SEQ ID NO: 267 - protein, 113 aa, synthetic construct
  REGION 1..113: note = Description of Artificial Sequence: Synthetic polypeptide
DVVMTQSPPSLSVTPGEPASITCRSSQSLLERNAYNYLDWYLQRPGQSPQLLIYLGSNRAAGVPDRFSGSGSGRDFTLKISRVEPEDVGVYYCMQALQAPFTFGGGTKVEIKR

SEQ ID NO: 268 - protein, 119 aa, synthetic construct
  REGION 1..119: note = Description of Artificial Sequence: Synthetic polypeptide
EVQLVQSGGGLVQPGGSLRLSCAASGFTFSSYAMSWVRQAPGKGLEWVSAISGSGGSTYYADSVKGRFTISRDNSKNTLYLQMNSLRAEDTAVYYCAKWGPFQDAFDIWGQGTMVTVSS

SEQ ID NO: 269 - DNA, 336 bp, synthetic construct
  misc_feature 1..336: note = Description of Artificial Sequence: Synthetic polynucleotide
  source 1..336: mol_type = other DNA
caggctgtgctgactcagcctgcctccgtgtctgggtctcctggacagtcgatcaccatctcctgcactggaaccagcagtgacgttggtggttataactatgtctcctggtaccaacagcacccgggcaaagcccccaaactcatgatttatgaggtcagtaatcggccctcaggggtttctaatcgcttctctggctccaagtctggcaacacggcctccctgaccatctctgggctccaggctgaggacgaggctgattattactgcagctcatatacaagcagcagcaccccttatgtcttcggagcagggaccaaggtcaccgtcctaggt

SEQ ID NO: 270 - DNA, 369 bp, synthetic construct
  misc_feature 1..369: note = Description of Artificial Sequence: Synthetic polynucleotide
  source 1..369: mol_type = other DNA
gaggtgcagctggtggagtctgggggaggcttggtacagcctggcaggtccctgagactctcctgtgcagcctctggattcacctttgatgattatgccatgcactgggtccggcaagctccagggaagggcctggagtgggtctcaggtattagttggaatagtggtagcataggctatgcggactctgtgaagggccgattcaccatctccagagacaacgccaagaactccctgtatctgcaaatgaacagtctgagagctgaggacacggccttgtattactgtgcaaaagccaggtggacagcagtggcatcagaccaccactttgactactggggccagggaacgctggtcaccgtctcctca

SEQ ID NO: 271 - protein, 112 aa, synthetic construct
  REGION 1..112: note = Description of Artificial Sequence: Synthetic polypeptide
QAVLTQPASVSGSPGQSITISCTGTSSDVGGYNYVSWYQQHPGKAPKLMIYEVSNRPSGVSNRFSGSKSGNTASLTISGLQAEDEADYYCSSYTSSSTPYVFGAGTKVTVLG

SEQ ID NO: 272 - protein, 123 aa, synthetic construct
  REGION 1..123: note = Description of Artificial Sequence: Synthetic polypeptide
EVQLVESGGGLVQPGRSLRLSCAASGFTFDDYAMHWVRQAPGKGLEWVSGISWNSGSIGYADSVKGRFTISRDNAKNSLYLQMNSLRAEDTALYYCAKARWTAVASDHHFDYWGQGTLVTVSS

SEQ ID NO: 273 - DNA, 333 bp, synthetic construct
  misc_feature 1..333: note = Description of Artificial Sequence: Synthetic polynucleotide
  source 1..333: mol_type = other DNA
caggctgtgcttactcagccaccctcagcgtctgggacccccgggcagagggtcaccatctcttgttctggaagcagctccaacatcggaagtaatactgtaaactggtaccagcagctcccaggaacggcccccaaactcctcatctatagtaataatcagcggccctcaggggtccctgaccgattctctggctccaagtctggcacctcagcctccctggccatcagtgggctccagtctgaggatgaggctgattattactgtgcagcatgggatgacagcctgaatggttatgtcttcggaactgggaccaagctgaccgtcctaggt

SEQ ID NO: 274 - DNA, 348 bp, synthetic construct
  misc_feature 1..348: note = Description of Artificial Sequence: Synthetic polynucleotide
  source 1..348: mol_type = other DNA
gaggtgcagctggtgcagtctggggctgaggtgaagaagcctgggtcctcggtgaaggtctcctgcaaggcttctggaggcaccttcagcagctatgctatcagctgggtgcgacaggcccctggacaagggcttgagtggatgggagggatcatccctatctttggtacagcaaactacgcacagaagttccagggcagagtcacgattaccgcggacgaatccacgagcacagcctacatggagctgagcagcctgagatctgaggacacggccgtgtattactgtgcgagagattgggactacatggacgtctggggcaaagggaccacggtcaccgtctcctca

SEQ ID NO: 275 - protein, 111 aa, synthetic construct
  REGION 1..111: note = Description of Artificial Sequence: Synthetic polypeptide
QAVLTQPPSASGTPGQRVTISCSGSSSNIGSNTVNWYQQLPGTAPKLLIYSNNQRPSGVPDRFSGSKSGTSASLAISGLQSEDEADYYCAAWDDSLNGYVFGTGTKLTVLG

SEQ ID NO: 276 - protein, 116 aa, synthetic construct
  REGION 1..116: note = Description of Artificial Sequence: Synthetic polypeptide
EVQLVQSGAEVKKPGSSVKVSCKASGGTFSSYAISWVRQAPGQGLEWMGGIIPIFGTANYAQKFQGRVTITADESTSTAYMELSSLRSEDTAVYYCARDWDYMDVWGKGTTVTVSS

SEQ ID NO: 277 - DNA, 333 bp, synthetic construct
  misc_feature 1..333: note = Description of Artificial Sequence: Synthetic polynucleotide
  source 1..333: mol_type = other DNA
tcctatgagctgactcagccaccctcagcgtctgggacccccgggcagagggtcaccatctcttgttctggaagcagctccaacatcggaagtaatactgtaaactggtaccagcagctcccaggaacggcccccaaactcctcatctatagtaataatcagcggccctcaggggtccctgaccgattctctggctccaagtctggcacctcagcctccctggccatcagtgggctccagtctgaggatgaggctgattattactgtgcagcatgggatgacagcctgaatggttatgtcttcggaactgggaccaaggtcaccgtcctaggt

SEQ ID NO: 278 - DNA, 381 bp, synthetic construct
  misc_feature 1..381: note = Description of Artificial Sequence: Synthetic polynucleotide
  source 1..381: mol_type = other DNA
gaggtgcagctggtggagtctggagctgaggtgaagaagcctggggcctcagtgaaggtctcctgcaaggcttctggttacacctttaccagctatggtatcagctgggtgcgacaggcccctggacaagggcttgagtggatgggatggatcagcgcttacaatggtaacacaaactatgcacagaagctccagggcagagtcaccatgaccacagacacatccacgagcacagcctacatggagctgaggagcctgagatctgacgacacggccgtgtattactgtgcgagagacctatctcggggagctaacccgcattactactactactacggtatggacgtctggggccaagggaccacggtcaccgtctcctca

SEQ ID NO: 279 - protein, 111 aa, synthetic construct
  REGION 1..111: note = Description of Artificial Sequence: Synthetic polypeptide
SYELTQPPSASGTPGQRVTISCSGSSSNIGSNTVNWYQQLPGTAPKLLIYSNNQRPSGVPDRFSGSKSGTSASLAISGLQSEDEADYYCAAWDDSLNGYVFGTGTKVTVLG

SEQ ID NO: 280 - protein, 127 aa, synthetic construct
  REGION 1..127: note = Description of Artificial Sequence: Synthetic polypeptide
EVQLVESGAEVKKPGASVKVSCKASGYTFTSYGISWVRQAPGQGLEWMGWISAYNGNTNYAQKLQGRVTMTTDTSTSTAYMELRSLRSDDTAVYYCARDLSRGANPHYYYYYGMDVWGQGTTVTVSS

SEQ ID NO: 281 - DNA, 342 bp, synthetic construct
  misc_feature 1..342: note = Description of Artificial Sequence: Synthetic polynucleotide
  source 1..342: mol_type = other DNA
cagtctgtgttgacgcagccgccctcagtgtctggggccccagggcagagggtcaccgtctcctgcactgggagcagatccaacatcggggcaggatatgatgtacactggtaccagcaacttccaggaacagcccccaaactcctcatctatggaaatagtaatcggcctccaggggtccctgaccgattctctgggtctaagtctggcacctcagcctccctggtcatcactgggctccaggctgaggatgccgctgattattactgccagtcctatgacaacactgtgcgtgaatcaccttatgtcttcggaactgggaccaaggtcaccgtcctaggt

SEQ ID NO: 282 - DNA, 375 bp, synthetic construct
  misc_feature 1..375: note = Description of Artificial Sequence: Synthetic polynucleotide
  source 1..375: mol_type = other DNA
gaggtccagctggtacagtctggggctgaggtgaagaagcctggggcctcagtgaaggtctcctgcaaggtttccggatacaccctcactgaattatccatgcactgggtgcgacaggctcctggaaaagggcttgagtggatgggaggttttgatcctgaagatggtgaaacaatctacgcacagaagttccagggcagagtcaccatgaccgaggacacatctacagacacagcctacatggagctgagcagcctgagatctgaggacacggccgtgtattactgtgcaacagagagtaatttagtgtcccggcactactactactacggtatggacgtctggggccaagggaccacggtcaccgtctcctca

SEQ ID NO: 283 - protein, 114 aa, synthetic construct
  REGION 1..114: note = Description of Artificial Sequence: Synthetic polypeptide
QSVLTQPPSVSGAPGQRVTVSCTGSRSNIGAGYDVHWYQQLPGTAPKLLIYGNSNRPPGVPDRFSGSKSGTSASLVITGLQAEDAADYYCQSYDNTVRESPYVFGTGTKVTVLG

SEQ ID NO: 284 - protein, 125 aa, synthetic construct
  REGION 1..125: note = Description of Artificial Sequence: Synthetic polypeptide
EVQLVQSGAEVKKPGASVKVSCKVSGYTLTELSMHWVRQAPGKGLEWMGGFDPEDGETIYAQKFQGRVTMTEDTSTDTAYMELSSLRSEDTAVYYCATESNLVSRHYYYYGMDVWGQGTTVTVSS

SEQ ID NO: 285 - DNA, 333 bp, synthetic construct
  misc_feature 1..333: note = Description of Artificial Sequence: Synthetic polynucleotide
  source 1..333: mol_type = other DNA
ctgcctgtgctgactcagccaccctcagcgtctgggacccccgggcagagggtcaccatctcttgttctggaaccagctccaacatcggaagtaattctgtagactggtaccagcagctcccaggaacggcccccaaactcctcatctatagtaataatcagcggccctcaggggtccctgaccgaatctctggctccaagtctggcacctcagcctccctggccatcagtgggctccagtctgaggatgaggctgattattactgtgcagcatgggatgacagcctgaatggttatgtcttcggaactgggaccaaggtcaccgtcctaggt

SEQ ID NO: 286 - DNA, 396 bp, synthetic construct
  misc_feature 1..396: note = Description of Artificial Sequence: Synthetic polynucleotide
  source 1..396: mol_type = other DNA
gaagtgcagctggtgcagtctggggctgaggtgaagaagcctggggcctcagtgaaggtctcctgcaaggcttctggatacaccttcaccggctactatatgcactgggtgcgacaggcccctggacaagggcttgagtggatgggatggatcaaccctaacagtggtggcacaaactatgcacagaagtttcagggcagggtcaccatgaccagggacacgtccatcagcacagcctacatggagctgagcaggctgagatctgacgacacggccgtgtattactgtgcgagagattacggatactatggttcggggagttattcgagcggccccctttactactactacggtatggacgtctggggccaagggaccacggtcaccgtctcctca

SEQ ID NO: 287 - protein, 111 aa, synthetic construct
  REGION 1..111: note = Description of Artificial Sequence: Synthetic polypeptide
LPVLTQPPSASGTPGQRVTISCSGTSSNIGSNSVDWYQQLPGTAPKLLIYSNNQRPSGVPDRISGSKSGTSASLAISGLQSEDEADYYCAAWDDSLNGYVFGTGTKVTVLG

SEQ ID NO: 288 - protein, 132 aa, synthetic construct
  REGION 1..132: note = Description of Artificial Sequence: Synthetic polypeptide
EVQLVQSGAEVKKPGASVKVSCKASGYTFTGYYMHWVRQAPGQGLEWMGWINPNSGGTNYAQKFQGRVTMTRDTSISTAYMELSRLRSDDTAVYYCARDYGYYGSGSYSSGPLYYYYGMDVWGQGTTVTVSS

SEQ ID NO: 289 - DNA, 333 bp, synthetic construct
  misc_feature 1..333: note = Description of Artificial Sequence: Synthetic polynucleotide
  source 1..333: mol_type = other DNA
caggctgtgctgactcagccaccctcagcgtctgggacccccgggcagagggtcaccatctcttgttctggaagcagctccaacatcggaagtaatactgtaaactggtaccagcagctcccaggaacggcccccaaactcctcatgtataataatgatcagcggccctcaggggtccctgaccgattctctggctccaagtctggcacctcagcctccctggccatcagtgggctccagtctgaggatgaggctgattattactgtgcagcatgggatgacagcctcaatggttatgtcttcggacctgggaccaaggtcaccgtcctaggt

SEQ ID NO: 290 - DNA, 381 bp, synthetic construct
  misc_feature 1..381: note = Description of Artificial Sequence: Synthetic polynucleotide
  source 1..381: mol_type = other DNA
caggtgcagctggtggagtctggagctgaggtgaagaagcctggggcctcagtgaaggtctcctgcaaggcttctggttacacctttaccagctatggtatcagctgggtgcgacaggcccctggacaagggcttgagtggatgggatggatcagcgcttacaatggtaacacaaactatgcacagaagctccagggcagagtcaccatgaccacagacacatccacgagcacagcctacatggagctgaggagcctgagatctgacgacacggccgtgtattactgtgcgagagacctatctcggggagctaacccgcattactactactactacggtatggacgtctggggccaagggaccacggtcaccgtctcctca

SEQ ID NO: 291 - protein, 111 aa, synthetic construct
  REGION 1..111: note = Description of Artificial Sequence: Synthetic polypeptide
QAVLTQPPSASGTPGQRVTISCSGSSSNIGSNTVNWYQQLPGTAPKLLMYNNDQRPSGVPDRFSGSKSGTSASLAISGLQSEDEADYYCAAWDDSLNGYVFGPGTKVTVLG

SEQ ID NO: 292 - protein, 127 aa, synthetic construct
  REGION 1..127: note = Description of Artificial Sequence: Synthetic polypeptide
QVQLVESGAEVKKPGASVKVSCKASGYTFTSYGISWVRQAPGQGLEWMGWISAYNGNTNYAQKLQGRVTMTTDTSTSTAYMELRSLRSDDTAVYYCARDLSRGANPHYYYYYGMDVWGQGTTVTVSS

SEQ ID NO: 293 - DNA, 333 bp, synthetic construct
  misc_feature 1..333: note = Description of Artificial Sequence: Synthetic polynucleotide
  source 1..333: mol_type = other DNA
aattttatgctgactcagccccacgctgtgtcggagtctccggggaagacggtaaccatctcctgcacccgcagcagtggcagtattgccagcaactatgtgcagtggtaccagcagcgcccgggcagttccccccgcactgtgatttatgaggataatcaaagaccctctggggtccctggtcggttctctggctccatcgacagctcctccaactctgcctccctcaccatctctggactgaagactgaggacgaggctgactactactgtcagtcttatgattccaccagtgtgcttttcggcggagggaccaagctgaccgtcctaggt

SEQ ID NO: 294 - DNA, 360 bp, synthetic construct
  misc_feature 1..360: note = Description of Artificial Sequence: Synthetic polynucleotide
  source 1..360: mol_type = other DNA
gaggtccagctggtgcagtctggggctgaggtgaagaagccagggtcctcggtgaaggtctcctgcaaggcctcgggaggcaccttcagcagcaattctctcagctgggtgcgacaggcccctggacaagggcttgagtggatgggaaggatcttccctatcctgggtataacaaactatgcacagaagttccagggcagagtcacgattaccgcggacaaatccacgagcacagcctacatggagctgagcagcctgagatctgaggacacggccgtctattactgtgcgagaggaaactaccaatggtatgatgcttttgatatctggggccaagggacaatggtcaccgtctcttca

SEQ ID NO: 295 - protein, 111 aa, synthetic construct
  REGION 1..111: note = Description of Artificial Sequence: Synthetic polypeptide
NFMLTQPHAVSESPGKTVTISCTRSSGSIASNYVQWYQQRPGSSPRTVIYEDNQRPSGVPGRFSGSIDSSSNSASLTISGLKTEDEADYYCQSYDSTSVLFGGGTKLTVLG

SEQ ID NO: 296 - protein, 120 aa, synthetic construct
  REGION 1..120: note = Description of Artificial Sequence: Synthetic polypeptide
EVQLVQSGAEVKKPGSSVKVSCKASGGTFSSNSLSWVRQAPGQGLEWMGRIFPILGITNYAQKFQGRVTITADKSTSTAYMELSSLRSEDTAVYYCARGNYQWYDAFDIWGQGTMVTVSS

SEQ ID NO: 297 - DNA, 330 bp, synthetic construct
  misc_feature 1..330: note = Description of Artificial Sequence: Synthetic polynucleotide
  source 1..330: mol_type = other DNA
cagcctgtgctgactcagccaccctcagtgtcagtggtcccaggaaagacggccaggattacctgtgggggaaaaaacattggaagtaaaagtgtgcactggtaccagcagaagccaggccaggcccctgtggtggtcatccattatgatagtgaccggccctcagggatccctgagcgattctctggctccaactctgggaacacggccaccctgaccatcagcagggtcgaagccggggatgaggccgactattactgtcaggtgtgggatagtagtagtgatcatccttatgtcttcggaactgggaccaaggtcaccgtcctaggt

SEQ ID NO: 298 - DNA, 351 bp, synthetic construct
  misc_feature 1..351: note = Description of Artificial Sequence: Synthetic polynucleotide
  source 1..351: mol_type = other DNA
caggtgcagctggtgcagtctggagctgaggtgaagaagcctggggcctcagtgaaggtctcctgcaaggcttctggttacacctttaccaactatggtatcagctgggtgcgacaggcccctggacaagggcttgagtggatgggatggatcagcgcttacaatggtaacacaaactatgcacataagctccagggcagagtcaccatgaccacagacacatccacgagcacagccaacatggagctgaggagcctgagacctgacgacactgccgtgtattactgtgcgcgctcttacttcggttctcatgattactggggtcaaggtactctggtgaccgtctcctca

SEQ ID NO: 299 - protein, 110 aa, synthetic construct
  REGION 1..110: note = Description of Artificial Sequence: Synthetic polypeptide
QPVLTQPPSVSVVPGKTARITCGGKNIGSKSVHWYQQKPGQAPVVVIHYDSDRPSGIPERFSGSNSGNTATLTISRVEAGDEADYYCQVWDSSSDHPYVFGTGTKVTVLG

SEQ ID NO: 300 - protein, 117 aa, synthetic construct
  REGION 1..117: note = Description of Artificial Sequence: Synthetic polypeptide
QVQLVQSGAEVKKPGASVKVSCKASGYTFTNYGISWVRQAPGQGLEWMGWISAYNGNTNYAHKLQGRVTMTTDTSTSTANMELRSLRPDDTAVYYCARSYFGSHDYWGQGTLVTVSS

SEQ ID NO: 301 - DNA, 327 bp, synthetic construct
  misc_feature 1..327: note = Description of Artificial Sequence: Synthetic polynucleotide
  source 1..327: mol_type = other DNA
tcctatgtgctgactcagccaccctcggtgtcagtggccccaggaaagacggccaggatttcctgtgggggaaacgacattggaagtaaaagtgttttctggtatcagcagaggccaggccaggcccctgtgttggtcgtctatgatgatagcgaccggccctcagggctccctgagcgattctctggcttcaactctgggaacacggccaccctgaccatcagcagggtcgaagccggggatgaggccgactattactgtcaagtgtgggatagtagtagtgatcattatgtcttcggaactgggaccaaggtcaccgtcctaggt

SEQ ID NO: 302 - DNA, 369 bp, synthetic construct
  misc_feature 1..369: note = Description of Artificial Sequence: Synthetic polynucleotide
  source 1..369: mol_type = other DNA
caggtgcagctggtggagtctgggggaggcttggtacagcctggcaggtccctgagactctcctgtgcagcctctggattcacctttgatgattatgccatgcactgggtccggcaagctccagggaagggcctggagtgggtctcaggtattagttggaatagtggtagcataggctatgcggactctgtgaagggccgattcaccatctccagagacaacgccaagaactccctgtatctgcaaatgaacagtctgagagctgaggacacggccttgtattactgtgcaaaagatataacctatggttcggggagttatggtgcttttgatatctggggccaagggacaatggtcaccgtctcttca

SEQ ID NO: 303 - protein, 109 aa, synthetic construct
  REGION 1..109: note = Description of Artificial Sequence: Synthetic polypeptide
SYVLTQPPSVSVAPGKTARISCGGNDIGSKSVFWYQQRPGQAPVLVVYDDSDRPSGLPERFSGFNSGNTATLTISRVEAGDEADYYCQVWDSSSDHYVFGTGTKVTVLG

SEQ ID NO: 304 - protein, 123 aa, synthetic construct
  REGION 1..123: note = Description of Artificial Sequence: Synthetic polypeptide
QVQLVESGGGLVQPGRSLRLSCAASGFTFDDYAMHWVRQAPGKGLEWVSGISWNSGSIGYADSVKGRFTISRDNAKNSLYLQMNSLRAEDTALYYCAKDITYGSGSYGAFDIWGQGTMVTVSS

SEQ ID NO: 305 - DNA, 63 bp, synthetic construct
  misc_feature 1..63: note = Description of Artificial Sequence: Synthetic oligonucleotide
  source 1..63: mol_type = other DNA
tctagaggtggtggtggtagcggcggcggcggctctggtggtggtggatccctcgagatggcc

SEQ ID NO: 306 - DNA, 75 bp, synthetic construct
  misc_feature 1..75: note = Description of Artificial Sequence: Synthetic oligonucleotide
  source 1..75: mol_type = other DNA
actagtggccaggccggccagcaccatcaccatcaccatggcgcatacccgtacgacgttccggactacgcttct

SEQ ID NO: 307 - protein, 21 aa, synthetic construct
  REGION 1..21: note = Description of Artificial Sequence: Synthetic peptide
SRGGGGSGGGGSGGGGSLEMA

SEQ ID NO: 308 - protein, 25 aa, synthetic construct
  REGION 1..25: note = Description of Artificial Sequence: Synthetic peptide
TSGQAGQHHHHHHGAYPYDVPDYAS

SEQ ID NO: 309 - protein, 8 aa, synthetic construct
  REGION 1..8: note = Description of Artificial Sequence: Synthetic peptide
GGSFSGYY

SEQ ID NO: 310 - protein, 7 aa, synthetic construct
  REGION 1..7: note = Description of Artificial Sequence: Synthetic peptide
INHSGST

SEQ ID NO: 311 - protein, 11 aa, synthetic construct
  REGION 1..11: note = Description of Artificial Sequence: Synthetic peptide
AREGPYDGFDS

SEQ ID NO: 312 - protein, 8 aa, synthetic construct
  REGION 1..8: note = Description of Artificial Sequence: Synthetic peptide
SSNIGSNT

SEQ ID NO: 313 - skipped

SEQ ID NO: 314 - protein, 11 aa, synthetic construct
  REGION 1..11: note = Description of Artificial Sequence: Synthetic peptide
AAWDDSLNGYV

SEQ ID NO: 315 - protein, 8 aa, synthetic construct
  REGION 1..8: note = Description of Artificial Sequence: Synthetic peptide
GYPFNKYD

SEQ ID NO: 316 - protein, 8 aa, synthetic construct
  REGION 1..8: note = Description of Artificial Sequence: Synthetic peptide
IIPIFRTT

SEQ ID NO: 317 - protein, 9 aa, synthetic construct
  REGION 1..9: note = Description of Artificial Sequence: Synthetic peptide
AREWFYWDI

SEQ ID NO: 318 - protein, 8 aa, synthetic construct
  REGION 1..8: note = Description of Artificial Sequence: Synthetic peptide
SGSIASNY

SEQ ID NO: 319 - skipped

SEQ ID NO: 320 - protein, 10 aa, synthetic construct
  REGION 1..10: note = Description of Artificial Sequence: Synthetic peptide
QSYDSSNSVV

SEQ ID NO: 321 - protein, 8 aa, synthetic construct
  REGION 1..8: note = Description of Artificial Sequence: Synthetic peptide
GFTFSSYG

SEQ ID NO: 322 - protein, 8 aa, synthetic construct
  REGION 1..8: note = Description of Artificial Sequence: Synthetic peptide
ISHDGSNK

SEQ ID NO: 323 - protein, 14 aa, synthetic construct
  REGION 1..14: note = Description of Artificial Sequence: Synthetic peptide
ARSNQWSGYFSFDY

SEQ ID NO: 324 - protein, 6 aa, synthetic construct
  REGION 1..6: note = Description of Artificial Sequence: Synthetic peptide
KLGTKY

SEQ ID NO: 325 - protein, 10 aa, synthetic construct
  REGION 1..10: note = Description of Artificial Sequence: Synthetic peptide
QAWDSDTFVV

SEQ ID NO: 326 - protein, 8 aa, synthetic construct
  REGION 1..8: note = Description of Artificial Sequence: Synthetic peptide
GYTFTNYG

SEQ ID NO: 327 - protein, 8 aa, synthetic construct
  REGION 1..8: note = Description of Artificial Sequence: Synthetic peptide
ISAYNGNT

SEQ ID NO: 328 - protein, 10 aa, synthetic construct
  REGION 1..10: note = Description of Artificial Sequence: Synthetic peptide
ARSYFGSHDY

SEQ ID NO: 329 - protein, 6 aa, synthetic construct
  REGION 1..6: note = Description of Artificial Sequence: Synthetic peptide
NIGSKS

SEQ ID NO: 330 - skipped

SEQ ID NO: 331 - protein, 12 aa, synthetic construct
  REGION 1..12: note = Description of Artificial Sequence: Synthetic peptide
QVWDSSSDHPYV

SEQ ID NO: 332 - protein, 8 aa, synthetic construct
  REGION 1..8: note = Description of Artificial Sequence: Synthetic peptide
GYTFTTYG

SEQ ID NO: 333 - protein, 8 aa, synthetic construct
  REGION 1..8: note = Description of Artificial Sequence: Synthetic peptide
INTYNGHT

SEQ ID NO: 334 - protein, 10 aa, synthetic construct
  REGION 1..10: note = Description of Artificial Sequence: Synthetic peptide
ARVIYGSGDY

SEQ ID NO: 335 - protein, 9 aa, synthetic construct
  REGION 1..9: note = Description of Artificial Sequence: Synthetic peptide
GYSISSGYF

SEQ ID NO: 336 - protein, 7 aa, synthetic construct
  REGION 1..7: note = Description of Artificial Sequence: Synthetic peptide
IYHSRST

SEQ ID NO: 337 - protein, 9 aa, synthetic construct
  REGION 1..9: note = Description of Artificial Sequence: Synthetic peptide
ARGYGYFDY

SEQ ID NO: 338 - protein, 6 aa, synthetic construct
  REGION 1..6: note = Description of Artificial Sequence: Synthetic peptide
NIGSKT

SEQ ID NO: 339 - protein, 11 aa, synthetic construct
  REGION 1..11: note = Description of Artificial Sequence: Synthetic peptide
QVWDSSSDHRV

SEQ ID NO: 340 - protein, 8 aa, synthetic construct
  REGION 1..8: note = Description of Artificial Sequence: Synthetic peptide
GFTFGDYG

SEQ ID NO: 341 - protein, 8 aa, synthetic construct
  REGION 1..8: note = Description of Artificial Sequence: Synthetic peptide
INWNGGST

SEQ ID NO: 342 - protein, 13 aa, synthetic construct
  REGION 1..13: note = Description of Artificial Sequence: Synthetic peptide
ARSKYNFHVYYDY

SEQ ID NO: 343 - protein, 9 aa, synthetic construct
  REGION 1..9: note = Description of Artificial Sequence: Synthetic peptide
SSDVGGYNY

SEQ ID NO: 344 - skipped

SEQ ID NO: 345 - protein, 11 aa, synthetic construct
  REGION 1..11: note = Description of Artificial Sequence: Synthetic peptide
SSYTSSSTSKV

SEQ ID NO: 346 - protein, 8 aa, synthetic construct
  REGION 1..8: note = Description of Artificial Sequence: Synthetic peptide
GYTFTSYG

SEQ ID NO: 347 - protein, 13 aa, synthetic construct
  REGION 1..13: note = Description of Artificial Sequence: Synthetic peptide
ARSSGNMVSWKDM

SEQ ID NO: 348 - protein, 8 aa, synthetic construct
  REGION 1..8: note = Description of Artificial Sequence: Synthetic peptide
NSNIGSNY

SEQ ID NO: 349 - skipped

SEQ ID NO: 350 - protein, 11 aa, synthetic construct
  REGION 1..11: note = Description of Artificial Sequence: Synthetic peptide
AAWDDSLSAYV

SEQ ID NO: 351 - protein, 9 aa, synthetic construct
  REGION 1..9: note = Description of Artificial Sequence: Synthetic peptide
ARGAVAYHD

SEQ ID NO: 352 - protein, 9 aa, synthetic construct
  REGION 1..9: note = Description of Artificial Sequence: Synthetic peptide
SSDVGGYNS

SEQ ID NO: 353 - protein, 11 aa, synthetic construct
  REGION 1..11: note = Description of Artificial Sequence: Synthetic peptide
SSYTSSSTPLV

SEQ ID NO: 354 - protein, 8 aa, synthetic construct
  REGION 1..8: note = Description of Artificial Sequence: Synthetic peptide
GGTLSSYA

SEQ ID NO: 355 - protein, 8 aa, synthetic construct
  REGION 1..8: note = Description of Artificial Sequence: Synthetic peptide
IIPMFGTA

SEQ ID NO: 356 - protein, 11 aa, synthetic construct
  REGION 1..11: note = Description of Artificial Sequence: Synthetic peptide
ARGVHYASFDH

SEQ ID NO: 357 - protein, 8 aa, synthetic construct
  REGION 1..8: note = Description of Artificial Sequence: Synthetic peptide
SSNISIYD

SEQ ID NO: 358 - skipped

SEQ ID NO: 359 - protein, 11 aa, synthetic construct
  REGION 1..11: note = Description of Artificial Sequence: Synthetic peptide
GTWDDSLSGGV

SEQ ID NO: 360 - protein, 8 aa, synthetic construct
  REGION 1..8: note = Description of Artificial Sequence: Synthetic peptide
GFPFNIFG

SEQ ID NO: 361 - protein, 8 aa, synthetic construct
  REGION 1..8: note = Description of Artificial Sequence: Synthetic peptide
ISGYNGNT

SEQ ID NO: 362 - protein, 10 aa, synthetic construct
  REGION 1..10: note = Description of Artificial Sequence: Synthetic peptide
ARGAYGGMDT

SEQ ID NO: 363 - protein, 8 aa, synthetic construct
  REGION 1..8: note = Description of Artificial Sequence: Synthetic peptide
DSNIGNNY

SEQ ID NO: 364 - skipped

SEQ ID NO: 365 - protein, 11 aa, synthetic construct
  REGION 1..11: note = Description of Artificial Sequence: Synthetic peptide
GTWDSRLDAYV

SEQ ID NO: 366 - protein, 8 aa, synthetic construct
  REGION 1..8: note = Description of Artificial Sequence: Synthetic peptide
GYMFTSYG

SEQ ID NO: 367 - protein, 8 aa, synthetic construct
  REGION 1..8: note = Description of Artificial Sequence: Synthetic peptide
ISANNGKT

SEQ ID NO: 368 - protein, 11 aa, synthetic construct
  REGION 1..11: note = Description of Artificial Sequence: Synthetic peptide
ARHIGGSYFDR

SEQ ID NO: 369 - protein, 9 aa, synthetic construct
  REGION 1..9: note = Description of Artificial Sequence: Synthetic peptide
TSNIGAGYD

SEQ ID NO: 370 - skipped

SEQ ID NO: 371 - protein, 11 aa, synthetic construct
  REGION 1..11: note = Description of Artificial Sequence: Synthetic peptide
GTWDSSLSAVV

SEQ ID NO: 372 - protein, 8 aa, synthetic construct
  REGION 1..8: note = Description of Artificial Sequence: Synthetic peptide
GFTFSSYA

SEQ ID NO: 373 - protein, 8 aa, synthetic construct
  REGION 1..8: note = Description of Artificial Sequence: Synthetic peptide
ISGSDGST

SEQ ID NO: 374 - protein, 12 aa, synthetic construct
  REGION 1..12: note = Description of Artificial Sequence: Synthetic peptide
ARSHEANLVGDW

SEQ ID NO: 375 - protein, 11 aa, synthetic construct
  REGION 1..11: note = Description of Artificial Sequence: Synthetic peptide
QVWDSSSDHYV

SEQ ID NO: 376 - protein, 11 aa, synthetic construct
  REGION 1..11: note = Description of Artificial Sequence: Synthetic peptide
ARWGGFGAVDH

SEQ ID NO: 377 - protein, 10 aa, synthetic construct
  REGION 1..10: note = Description of Artificial Sequence: Synthetic peptide
QVWDSSSDVV

SEQ ID NO: 378 - protein, 8 aa, synthetic construct
  REGION 1..8: note = Description of Artificial Sequence: Synthetic peptide
GFTFSSYS

SEQ ID NO: 379 - protein, 8 aa, synthetic construct
  REGION 1..8: note = Description of Artificial Sequence: Synthetic peptide
ISSSSSYI

SEQ ID NO: 380 - protein, 8 aa, synthetic construct
  REGION 1..8: note = Description of Artificial Sequence: Synthetic peptide
ARGQGYDY

SEQ ID NO: 381 - protein, 6 aa, synthetic construct
  REGION 1..6: note = Description of Artificial Sequence: Synthetic peptide
SLTDYH

SEQ ID NO: 382 - skipped

SEQ ID NO: 383 - protein, 11 aa, synthetic construct
  REGION 1..11: note = Description of Artificial Sequence: Synthetic peptide
NSRDSGTDEVL

SEQ ID NO: 384 - protein, 9 aa, synthetic construct
  REGION 1..9: note = Description of Artificial Sequence: Synthetic peptide
ARYYPGMDM

SEQ ID NO: 385 - skipped

SEQ ID NO: 386 - protein, 11 aa, synthetic construct
  REGION 1..11: note = Description of Artificial Sequence: Synthetic peptide
QVWDSSSDHTV

SEQ ID NO: 387 - protein, 8 aa, synthetic construct
  REGION 1..8: note = Description of Artificial Sequence: Synthetic peptide
GYTLNELS

SEQ ID NO: 388 - protein, 8 aa, synthetic construct
  REGION 1..8: note = Description of Artificial Sequence: Synthetic peptide
FDPEDGET

SEQ ID NO: 389 - protein, 8 aa, synthetic construct
  REGION 1..8: note = Description of Artificial Sequence: Synthetic peptide
ARGGYGDS

SEQ ID NO: 390 - protein, 8 aa, synthetic construct
  REGION 1..8: note = Description of Artificial Sequence: Synthetic peptide
SSNIGRNG

SEQ ID NO: 391 - skipped

SEQ ID NO: 392 - protein, 11 aa, synthetic construct
  REGION 1..11: note = Description of Artificial Sequence: Synthetic peptide
AAWDDSLHGVV

SEQ ID NO: 393 - protein, 8 aa, synthetic construct
  REGION 1..8: note = Description of Artificial Sequence: Synthetic peptide
GGTFSSDA

SEQ ID NO: 394 - protein, 25 aa, synthetic construct
  REGION 1..25: note = Description of Artificial Sequence: Synthetic peptide
AREGYYYPSAYLGSVLNDISSVYDE

SEQ ID NO: 395 - protein, 10 aa, synthetic construct
  REGION 1..10: note = Description of Artificial Sequence: Synthetic peptide
QSYDSSNSWV

SEQ ID NO: 396 - protein, 9 aa, synthetic construct
  REGION 1..9: note = Description of Artificial Sequence: Synthetic peptide
ARSMTSFDY

SEQ ID NO: 397 - protein, 8 aa, synthetic construct
  REGION 1..8: note = Description of Artificial Sequence: Synthetic peptide
TSNIGNND

SEQ ID NO: 398 - skipped

SEQ ID NO: 399 - protein, 10 aa, synthetic construct
  REGION 1..10: note = Description of Artificial Sequence: Synthetic peptide
GTWDSSVSAS

SEQ ID NO: 400 - protein, 9 aa, synthetic construct
  REGION 1..9: note = Description of Artificial Sequence: Synthetic peptide
ARSVYDLDT

SEQ ID NO: 401 - protein, 8 aa, synthetic construct
  REGION 1..8: note = Description of Artificial Sequence: Synthetic peptide
NSNIGNNY

SEQ ID NO: 402 - protein, 12 aa, synthetic construct
  REGION 1..12: note = Description of Artificial Sequence: Synthetic peptide
GTWNTTVTPGYV

SEQ ID NO: 403 - protein, 8 aa, synthetic construct
  REGION 1..8: note = Description of Artificial Sequence: Synthetic peptide
GFTFDDYA

SEQ ID NO: 404 - protein, 8 aa, synthetic construct
  REGION 1..8: note = Description of Artificial Sequence: Synthetic peptide
ISWNSGSI

SEQ ID NO: 405 - protein, 12 aa, synthetic construct
  REGION 1..12: note = Description of Artificial Sequence: Synthetic peptide
ARYRQVGSAYDS

SEQ ID NO: 406 - protein, 8 aa, synthetic construct
  REGION 1..8: note = Description of Artificial Sequence: Synthetic peptide
SSNIGNNY

SEQ ID NO: 407 - protein, 12 aa, synthetic construct
  REGION 1..12: note = Description of Artificial Sequence: Synthetic peptide
GTWDSSLGAPYV

SEQ ID NO: 408 - protein, 11 aa, synthetic construct
  REGION 1..11: note = Description of Artificial Sequence: Synthetic peptide
ARYWGFGVSDR

SEQ ID NO: 409 - skipped

SEQ ID NO: 410 - protein, 12 aa, synthetic construct
  REGION 1..12: note = Description of Artificial Sequence: Synthetic peptide
QVWDSSSYHNYV

SEQ ID NO: 411 - protein, 8 aa, synthetic construct
  REGION 1..8: note = Description of Artificial Sequence: Synthetic peptide
GGTFSSYA

SEQ ID NO: 412 - protein, 8 aa, synthetic construct
  REGION 1..8: note = Description of Artificial Sequence: Synthetic peptide
IIPIFGTA

SEQ ID NO: 413 - protein, 10 aa, synthetic construct
  REGION 1..10: note = Description of Artificial Sequence: Synthetic peptide
ARYNYYYYDS

SEQ ID NO: 414 - protein, 10 aa, synthetic construct
  REGION 1..10: note = Description of Artificial Sequence: Synthetic peptide
QSYDSSNLWV

SEQ ID NO: 415 - protein, 11 aa, synthetic construct
  REGION 1..11: note = Description of Artificial Sequence: Synthetic peptide
ARYWGYDSYDE

SEQ ID NO: 416 - protein, 6 aa, synthetic construct
  REGION 1..6: note = Description of Artificial Sequence: Synthetic peptide
QSISSY

SEQ ID NO: 417 - skipped

SEQ ID NO: 418 - protein, 9 aa, synthetic construct
  REGION 1..9: note = Description of Artificial Sequence: Synthetic peptide
QQSYSTPFT

SEQ ID NO: 419 - protein, 9 aa, synthetic construct
  REGION 1..9: note = Description of Artificial Sequence: Synthetic peptide
QSYDSSNWV

SEQ ID NO: 420 - protein, 8 aa, synthetic construct
  REGION 1..8: note = Description of Artificial Sequence: Synthetic peptide
GYTFTDYY

SEQ ID NO: 421 - protein, 8 aa, synthetic construct
  REGION 1..8: note = Description of Artificial Sequence: Synthetic peptide
VDPEDGET

SEQ ID NO: 422 - protein, 19 aa, synthetic construct
  REGION 1..19: note = Description of Artificial Sequence: Synthetic peptide
ARYWSYSFDYLYMPEGNDW

SEQ ID NO: 423 - protein, 9 aa, synthetic construct
  REGION 1..9: note = Description of Artificial Sequence: Synthetic peptide
SSNIGAGYD

SEQ ID NO: 424 - protein, 11 aa, synthetic construct
  REGION 1..11: note = Description of Artificial Sequence: Synthetic peptide
QSYDSSLSDVV

SEQ ID NO: 425 - protein, 8 aa, synthetic construct
  REGION 1..8: note = Description of Artificial Sequence: Synthetic peptide
GYNFLNYG

SEQ ID NO: 426 - protein, 8 aa, synthetic construct
  REGION 1..8: note = Description of Artificial Sequence: Synthetic peptide
ISTYTGNT

SEQ ID NO: 427 - protein, 12 aa, synthetic construct
  REGION 1..12: note = Description of Artificial Sequence: Synthetic peptide
ARDLYYYEGVDY

SEQ ID NO: 428 - protein, 8 aa, synthetic construct
  REGION 1..8: note = Description of Artificial Sequence: Synthetic peptide
VSNIGSGA

SEQ ID NO: 429 - skipped

SEQ ID NO: 430 - protein, 9 aa, synthetic construct
  REGION 1..9: note = Description of Artificial Sequence: Synthetic peptide
ATWDDSVNG

SEQ ID NO: 431 - protein, 8 aa, synthetic construct
  REGION 1..8: note = Description of Artificial Sequence: Synthetic peptide
ISYDGSNK

SEQ ID NO: 432 - protein, 12 aa, synthetic construct
  REGION 1..12: note = Description of Artificial Sequence: Synthetic peptide
ARSYFTSGFYDY

SEQ ID NO: 433 - protein, 6 aa, synthetic construct
  REGION 1..6: note = Description of Artificial Sequence: Synthetic peptide
NIGSES

SEQ ID NO: 434 - skipped

SEQ ID NO: 435 - protein, 11 aa, synthetic construct
  REGION 1..11: note = Description of Artificial Sequence: Synthetic peptide
QVWDSSRDHVV

SEQ ID NO: 436 - protein, 8 aa, synthetic construct
  REGION 1..8: note = Description of Artificial Sequence: Synthetic peptide
GYTLTELS

SEQ ID NO: 437 - protein, 9 aa, synthetic construct
  REGION 1..9: note = Description of Artificial Sequence: Synthetic peptide
ARMSSMYYD

SEQ ID NO: 438 - skipped

SEQ ID NO: 439 - protein, 12 aa, synthetic construct
  REGION 1..12: note = Description of Artificial Sequence: Synthetic peptide
QSYDSSLSGSYV

SEQ ID NO: 440 - protein, 8 aa, synthetic construct
  REGION 1..8: note = Description of Artificial Sequence: Synthetic peptide
GFTVSDYY

SEQ ID NO: 441 - protein, 8 aa, synthetic construct
  REGION 1..8: note = Description of Artificial Sequence: Synthetic peptide
ISGSGNSI

SEQ ID NO: 442 - protein, 8 aa, synthetic construct
  REGION 1..8: note = Description of Artificial Sequence: Synthetic peptide
ARSTKFDY

SEQ ID NO: 443 - protein, 10 aa, synthetic construct
  REGION 1..10: note = Description of Artificial Sequence: Synthetic peptide
QVWDSSSDYV

SEQ ID NO: 444 - protein, 8 aa, synthetic construct
  REGION 1..8: note = Description of Artificial Sequence: Synthetic peptide
GYSFTNYW

SEQ ID NO: 445 - protein, 8 aa, synthetic construct
  REGION 1..8: note = Description of Artificial Sequence: Synthetic peptide
IYPGDSDT

SEQ ID NO: 446 - protein, 12 aa, synthetic construct
  REGION 1..12: note = Description of Artificial Sequence: Synthetic peptide
ARSTGSSHMSDE

SEQ ID NO: 447 - protein, 8 aa, synthetic construct
  REGION 1..8: note = Description of Artificial Sequence: Synthetic peptide
SSNVGSYT

SEQ ID NO: 448 - skipped

SEQ ID NO: 449 - protein, 11 aa, synthetic construct
  REGION 1..11: note = Description of Artificial Sequence: Synthetic peptide
AAWDDRLGGYV

SEQ ID NO: 450 - protein, 7 aa, synthetic construct
  REGION 1..7: note = Description of Artificial Sequence: Synthetic peptide
ITHSGRS

SEQ ID NO: 451 - protein, 9 aa, synthetic construct
  REGION 1..9: note = Description of Artificial Sequence: Synthetic peptide
ARSSIMSDY

SEQ ID NO: 452 - protein, 10 aa, synthetic construct
  REGION 1..10: note = Description of Artificial Sequence: Synthetic peptide
QSYDSSNHWV

SEQ ID NO: 453 - protein, 11 aa, synthetic construct
  REGION 1..11: note = Description of Artificial Sequence: Synthetic peptide
ARGSALDHYDR

SEQ ID NO: 454 - skipped

SEQ ID NO: 455 - protein, 11 aa, synthetic construct
  REGION 1..11: note = Description of Artificial Sequence: Synthetic peptide
GTWDGSLTGAV

SEQ ID NO: 456 - protein, 10 aa, synthetic construct
  REGION 1..10: note = Description of Artificial Sequence: Synthetic peptide
ARYNYYFNDY

SEQ ID NO: 457 - protein, 9 aa, synthetic construct
  REGION 1..9: note = Description of Artificial Sequence: Synthetic peptide
QSYDSTNWV

SEQ ID NO: 458 - protein, 10 aa, synthetic construct
  REGION 1..10: note = Description of Artificial Sequence: Synthetic peptide
ARSMFGAHDS

SEQ ID NO: 459 - protein, 11 aa, synthetic construct
  REGION 1..11: note = Description of Artificial Sequence: Synthetic peptide
ARGASFDRHDN

SEQ ID NO: 460 - protein, 9 aa, synthetic construct
  REGION 1..9: note = Description of Artificial Sequence: Synthetic peptide
SSNIGAGFD

SEQ ID NO: 461 - skipped

SEQ ID NO: 462 - protein, 11 aa, synthetic construct
  REGION 1..11: note = Description of Artificial Sequence: Synthetic peptide
QSYDSSLSGVV

SEQ ID NO: 463 - protein, 10 aa, synthetic construct
  REGION 1..10: note = Description of Artificial Sequence: Synthetic peptide
ARSNYYYNDY

SEQ ID NO: 464 - protein, 9 aa, synthetic construct
  REGION 1..9: note = Description of Artificial Sequence: Synthetic peptide
ARYSGVYYD

SEQ ID NO: 465 - protein, 11 aa, synthetic construct
  REGION 1..11: note = Description of Artificial Sequence: Synthetic peptide
QSYDSSLSGYV

SEQ ID NO: 466 - protein, 8 aa, synthetic construct
  REGION 1..8: note = Description of Artificial Sequence: Synthetic peptide
MNPNSGNT

SEQ ID NO: 467 - protein, 9 aa, synthetic construct
  REGION 1..9: note = Description of Artificial Sequence: Synthetic peptide
ARYYSYGYD

SEQ ID NO: 468 - protein, 8 aa, synthetic construct
  REGION 1..8: note = Description of Artificial Sequence: Synthetic peptide
SGSIADNF

SEQ ID NO: 469 - skipped

SEQ ID NO: 470 - protein, 10 aa, synthetic construct
  REGION 1..10: note = Description of Artificial Sequence: Synthetic peptide
QSYDNNNRGV

SEQ ID NO: 471 - protein, 10 aa, synthetic construct
  REGION 1..10: note = Description of Artificial Sequence: Synthetic peptide
GDSVSTNSVA

SEQ ID NO: 472 - protein, 9 aa, synthetic construct
  REGION 1..9: note = Description of Artificial Sequence: Synthetic peptide
TYYRSKWSN

SEQ ID NO: 473 - protein, 12 aa, synthetic construct
  REGION 1..12: note = Description of Artificial Sequence: Synthetic peptide
ARSSSWYQIFDY

SEQ ID NO: 474 - protein, 9 aa, synthetic construct
  REGION 1..9: note = Description of Artificial Sequence: Synthetic peptide
SSNIGTGYF

SEQ ID NO: 475 - protein, 8 aa, synthetic construct
  REGION 1..8: note = Description of Artificial Sequence: Synthetic peptide
ISGSGGST

SEQ ID NO: 476 - protein, 14 aa, synthetic construct
  REGION 1..14: note = Description of Artificial Sequence: Synthetic peptide
ARSGAYWDYSVYDE

SEQ ID NO: 477 - protein, 8 aa, synthetic construct
  REGION 1..8: note = Description of Artificial Sequence: Synthetic peptide
SDSIANNY

SEQ ID NO: 478 - skipped

SEQ ID NO: 479 - protein, 10 aa, synthetic construct
  REGION 1..10: note = Description of Artificial Sequence: Synthetic peptide
QSYHSDNRWV

SEQ ID NO: 480 - protein, 9 aa, synthetic construct
  REGION 1..9: note = Description of Artificial Sequence: Synthetic peptide
GGSISSSNW

SEQ ID NO: 481 - protein, 7 aa, synthetic construct
  REGION 1..7: note = Description of Artificial Sequence: Synthetic peptide
IYHSGSP

SEQ ID NO: 482 - protein, 12 aa, synthetic construct
  REGION 1..12: note = Description of Artificial Sequence: Synthetic peptide
ARMTTHTFGYDA

SEQ ID NO: 483 - protein, 6 aa, synthetic construct
  REGION 1..6: note = Description of Artificial Sequence: Synthetic peptide
KLGDKY

SEQ ID NO: 484 - skipped

SEQ ID NO: 485 - protein, 10 aa, synthetic construct
  REGION 1..10: note = Description of Artificial Sequence: Synthetic peptide
QAWDSSTYVA

SEQ ID NO: 486 - protein, 8 aa, synthetic construct
  REGION 1..8: note = Description of Artificial Sequence: Synthetic peptide
ARGVHLDW

SEQ ID NO: 487 - skipped

SEQ ID NO: 488 - protein, 11 aa, synthetic construct
  REGION 1..11: note = Description of Artificial Sequence: Synthetic peptide
QVWDRNSAQFV

SEQ ID NO: 489 - protein, 19 aa, synthetic construct
  REGION 1..19: note = Description of Artificial Sequence: Synthetic peptide
ARLYEGGYHGWGSWLSSDS

SEQ ID NO: 490 - protein, 8 aa, synthetic construct
  REGION 1..8: note = Description of Artificial Sequence: Synthetic peptide
SSNIGSNY

SEQ ID NO: 491 - protein, 11 aa, synthetic construct
  REGION 1..11: note = Description of Artificial Sequence: Synthetic peptide
AAWDDSLSGYV

SEQ ID NO: 492 - protein, 11 aa, synthetic construct
  REGION 1..11: note = Description of Artificial Sequence: Synthetic peptide
AREGAFDAFDI

SEQ ID NO: 493 - protein, 10 aa, synthetic construct
  REGION 1..10: note = Description of Artificial Sequence: Synthetic peptide
AAWDDSLNGY

SEQ ID NO: 494 - protein, 13 aa, synthetic construct
  REGION 1..13: note = Description of Artificial Sequence: Synthetic peptide
ANGDSNYYYGMDV

SEQ ID NO: 495 - protein, 11 aa, synthetic construct
  REGION 1..11: note = Description of Artificial Sequence: Synthetic peptide
AAWDDSLSGYL

SEQ ID NO: 496 - protein, 8 aa, synthetic construct
  REGION 1..8: note = Description of Artificial Sequence: Synthetic peptide
ISGDGGST

SEQ ID NO: 497 - protein, 16 aa, synthetic construct
  REGION 1..16: note = Description of Artificial Sequence: Synthetic peptide
AKDRAAAGYYYYGMDV

SEQ ID NO: 498 - protein, 9 aa, synthetic construct
  REGION 1..9: note = Description of Artificial Sequence: Synthetic peptide
SSDIGGYNY

SEQ ID NO: 499 - protein, 11 aa, synthetic construct
  REGION 1..11: note = Description of Artificial Sequence: Synthetic peptide
ISYTRTWNPYV

SEQ ID NO: 500 - protein, 8 aa, synthetic construct
  REGION 1..8: note = Description of Artificial Sequence: Synthetic peptide
GFTFNDYA

SEQ ID NO: 501 - protein, 8 aa, synthetic construct
  REGION 1..8: note = Description of Artificial Sequence: Synthetic peptide
ISWSGNNI

SEQ ID NO: 502 - protein, 16 aa, synthetic construct
  REGION 1..16: note = Description of Artificial Sequence: Synthetic peptide
AKDSIRYGITWGGFDY

SEQ ID NO: 503 - protein, 6 aa, synthetic construct
  REGION 1..6: note = Description of Artificial Sequence: Synthetic peptide
KLGEKY

SEQ ID NO: 504 - skipped

SEQ ID NO: 505 - protein, 8 aa, synthetic construct
  REGION 1..8: note = Description of Artificial Sequence: Synthetic peptide
QAWDRGVV

SEQ ID NO: 506 - protein, 8 aa, synthetic construct
  REGION 1..8: note = Description of Artificial Sequence: Synthetic peptide
INWDGGST

SEQ ID NO: 507 - protein, 11 aa, synthetic construct
  REGION 1..11: note = Description of Artificial Sequence: Synthetic peptide
AKGMGLRAFDY

SEQ ID NO: 508 - protein, 8 aa, synthetic construct
  REGION 1..8: note = Description of Artificial Sequence: Synthetic peptide
SNNVGNLG

SEQ ID NO: 509 - protein, 9 aa, synthetic construct
  REGION 1..9: note = Description of Artificial Sequence: Synthetic peptide
SAWDSSLSA

SEQ ID NO: 510 - protein, 8 aa, synthetic construct
  REGION 1..8: note = Description of Artificial Sequence: Synthetic peptide
GYTFSWYA

SEQ ID NO: 511 - protein, 8 aa, synthetic construct
  REGION 1..8: note = Description of Artificial Sequence: Synthetic peptide
INAGNGNT

SEQ ID NO: 512 - protein, 15 aa, synthetic construct
  REGION 1..15: note = Description of Artificial Sequence: Synthetic peptide
ARPDNYGSGGDVFDI

SEQ ID NO: 513 - skipped

SEQ ID NO: 514 - protein, 12 aa, synthetic construct
  REGION 1..12: note = Description of Artificial Sequence: Synthetic peptide
ASWDDSLNGRYV

SEQ ID NO: 515 - protein, 8 aa, synthetic construct
  REGION 1..8: note = Description of Artificial Sequence: Synthetic peptide
GFTFSSYE

SEQ ID NO: 516 - protein, 8 aa, synthetic construct
  REGION 1..8: note = Description of Artificial Sequence: Synthetic peptide
ISSSGSTI

SEQ ID NO: 517 - protein, 9 aa, synthetic construct
  REGION 1..9: note = Description of Artificial Sequence: Synthetic peptide
ARWDYGMDV

SEQ ID NO: 518 - protein, 8 aa, synthetic construct
  REGION 1..8: note = Description of Artificial Sequence: Synthetic peptide
SGSIASNF

SEQ ID NO: 519 - protein, 9 aa, synthetic construct
  REGION 1..9: note = Description of Artificial Sequence: Synthetic peptide
QSYDTSNVV

SEQ ID NO: 520 - protein, 8 aa, synthetic construct
  REGION 1..8: note = Description of Artificial Sequence: Synthetic peptide
GYTFTWYA

SEQ ID NO: 521 - protein, 8 aa, synthetic construct
  REGION 1..8: note = Description of Artificial Sequence: Synthetic peptide
INAGSGNT

SEQ ID NO: 522 - protein, 15 aa, synthetic construct
  REGION 1..15: note = Description of Artificial Sequence: Synthetic peptide
ARPNNYGSGGDVFDI

SEQ ID NO: 523 - skipped

SEQ ID NO: 524 - protein, 9 aa, synthetic construct
  REGION 1..9: note = Description of Artificial Sequence: Synthetic peptide
ATWDDSLNA

SEQ ID NO: 525 - protein, 8 aa, synthetic construct
  REGION 1..8: note = Description of Artificial Sequence: Synthetic peptide
GYTFTNYA

SEQ ID NO: 526 - protein, 8 aa, synthetic construct
  REGION 1..8: note = Description of Artificial Sequence: Synthetic peptide
INGGNGNT

SEQ ID NO: 527 - protein, 14 aa, synthetic construct
  REGION 1..14: note = Description of Artificial Sequence: Synthetic peptide
AKPEETAGTIHFDY

SEQ ID NO: 528 - protein, 11 aa, synthetic construct
  REGION 1..11: note = Description of Artificial Sequence: Synthetic peptide
GTWDSSLSAYV

SEQ ID NO: 529 - protein, 19 aa, synthetic construct
  REGION 1..19: note = Description of Artificial Sequence: Synthetic peptide
AGEGYYDSSGYSNGDAFDI

SEQ ID NO: 530 - protein, 9 aa, synthetic construct
  REGION 1..9: note = Description of Artificial Sequence: Synthetic peptide
QSYDSTITV

SEQ ID NO: 531 - protein, 9 aa, synthetic construct
  REGION 1..9: note = Description of Artificial Sequence: Synthetic peptide
QSYDSSNVV

SEQ ID NO: 532 - protein, 16 aa, synthetic construct
  REGION 1..16: note = Description of Artificial Sequence: Synthetic peptide
AKDRGGGVIVKDAFDI

SEQ ID NO: 533 - protein, 6 aa, synthetic construct
  REGION 1..6: note = Description of Artificial Sequence: Synthetic peptide
RLTNKY

SEQ ID NO: 534 - skipped

SEQ ID NO: 535 - protein, 9 aa, synthetic construct
  REGION 1..9: note = Description of Artificial Sequence: Synthetic peptide
QAWDSSVVV

SEQ ID NO: 536 - protein, 11 aa, synthetic construct
  REGION 1..11: note = Description of Artificial Sequence: Synthetic peptide
ARQQGGGWYDV

SEQ ID NO: 537 - protein, 8 aa, synthetic construct
  REGION 1..8: note = Description of Artificial Sequence: Synthetic peptide
GYTFTSYT

SEQ ID NO: 538 - protein, 8 aa, synthetic construct
  REGION 1..8: note = Description of Artificial Sequence: Synthetic peptide
ISTYNGLT

SEQ ID NO: 539 - protein, 16 aa, synthetic construct
  REGION 1..16: note = Description of Artificial Sequence: Synthetic peptide
VREGSPDYGDFASFDY

SEQ ID NO: 540 - protein, 8 aa, synthetic construct
  REGION 1..8: note = Description of Artificial Sequence: Synthetic peptide
NFNVGNND

SEQ ID NO: 541 - protein, 12 aa, synthetic construct
  REGION 1..12: note = Description of Artificial Sequence: Synthetic peptide
GTWDSSLNTGGV

SEQ ID NO: 542 - protein, 12 aa, synthetic construct
  REGION 1..12: note = Description of Artificial Sequence: Synthetic peptide
GTWDTSLSGFYV

SEQ ID NO: 543 - protein, 16 aa, synthetic construct
  REGION 1..16: note = Description of Artificial Sequence: Synthetic peptide
ARDPAYGDYEYDAFDI

SEQ ID NO: 544 - protein, 8 aa, synthetic construct
  REGION 1..8: note = Description of Artificial Sequence: Synthetic peptide
TSNIGSNT

SEQ ID NO: 545 - protein, 11 aa, synthetic construct
  REGION 1..11: note = Description of Artificial Sequence: Synthetic peptide
ATWDDSLSGVV

SEQ ID NO: 546 - protein, 11 aa, synthetic construct
  REGION 1..11: note = Description of Artificial Sequence: Synthetic peptide
ARGAGFDAFDI

SEQ ID NO: 547 - protein, 8 aa, synthetic construct
  REGION 1..8: note = Description of Artificial Sequence: Synthetic peptide
SSNIGTNG

SEQ ID NO: 548 - skipped

SEQ ID NO: 549 - protein, 11 aa, synthetic construct
  REGION 1..11: note = Description of Artificial Sequence: Synthetic peptide
AVWDHSLNGPV

SEQ ID NO: 550 - protein, 10 aa, synthetic construct
  REGION 1..10: note = Description of Artificial Sequence: Synthetic peptide
AREGLDAFDI

SEQ ID NO: 551 - protein, 8 aa, synthetic construct
  REGION 1..8: note = Description of Artificial Sequence: Synthetic peptide
GYSFTSYT

SEQ ID NO: 552 - protein, 8 aa, synthetic construct
  REGION 1..8: note = Description of Artificial Sequence: Synthetic peptide
VSTYNGLR

SEQ ID NO: 553 - protein, 16 aa, synthetic construct
  REGION 1..16: note = Description of Artificial Sequence: Synthetic peptide
VREGSPDYGDFAAFDY

SEQ ID NO: 554 - protein, 12 aa, synthetic construct
  REGION 1..12: note = Description of Artificial Sequence: Synthetic peptide
GTWDSSLSAAYV

SEQ ID NO: 555 - protein, 10 aa, synthetic construct
  REGION 1..10: note = Description of Artificial Sequence: Synthetic peptide
ARDGGGYFDY

SEQ ID NO: 556 - protein, 8 aa, synthetic construct
  REGION 1..8: note = Description of Artificial Sequence: Synthetic peptide
RSNIGTNI

SEQ ID NO: 557 - skipped

SEQ ID NO: 558 - protein, 11 aa, synthetic construct
  REGION 1..11: note = Description of Artificial Sequence: Synthetic peptide
AAWDDSLNGPA

SEQ ID NO: 559 - protein, 8 aa, synthetic construct
  REGION 1..8: note = Description of Artificial Sequence: Synthetic peptide
GYNFISYY

SEQ ID NO: 560 - protein, 8 aa, synthetic construct
  REGION 1..8: note = Description of Artificial Sequence: Synthetic peptide
INPGSGET

SEQ ID NO: 561 - protein, 14 aa, synthetic construct
  REGION 1..14: note = Description of Artificial Sequence: Synthetic peptide
ATGLIRGASDAFNI

SEQ ID NO: 562 - protein, 9 aa, synthetic construct
  REGION 1..9: note = Description of Artificial Sequence: Synthetic peptide
SSNIGARYD

SEQ ID NO: 563 - skipped

SEQ ID NO: 564 - protein, 11 aa, synthetic construct
  REGION 1..11: note = Description of Artificial Sequence: Synthetic peptide
QSYDSSVSAWV

SEQ ID NO: 565 - protein, 10 aa, synthetic construct
  REGION 1..10: note = Description of Artificial Sequence: Synthetic peptide
GDSVSSNSAA

SEQ ID NO: 566 - protein, 9 aa, synthetic construct
  REGION 1..9: note = Description of Artificial Sequence: Synthetic peptide
TYYRSKWYN

SEQ ID NO: 567 - protein, 12 aa, synthetic construct
  REGION 1..12: note = Description of Artificial Sequence: Synthetic peptide
ARERSGWKGFDY

SEQ ID NO: 568 - protein, 6 aa, synthetic construct
  REGION 1..6: note = Description of Artificial Sequence: Synthetic peptide
KLGDKF

SEQ ID NO: 569 - protein, 9 aa, synthetic construct
  REGION 1..9: note = Description of Artificial Sequence: Synthetic peptide
QTWASGIVV

SEQ ID NO: 570 - protein, 12 aa, synthetic construct
  REGION 1..12: note = Description of Artificial Sequence: Synthetic peptide
AKWGPFQDAFDI

SEQ ID NO: 571 - protein, 11 aa, synthetic construct
  REGION 1..11: note = Description of Artificial Sequence: Synthetic peptide
QSLLERNAYNY

SEQ ID NO: 572 - skipped

SEQ ID NO: 573 - protein, 9 aa, synthetic construct
  REGION 1..9: note = Description of Artificial Sequence: Synthetic peptide
MQALQAPFT

SEQ ID NO: 574 - protein, 16 aa, synthetic construct
  REGION 1..16: note = Description of Artificial Sequence: Synthetic peptide
AKARWTAVASDHHFDY

SEQ ID NO: 575 - skipped

SEQ ID NO: 576 - protein, 11 aa, synthetic construct
  REGION 1..11: note = Description of Artificial Sequence: Synthetic peptide
SSYTSSSTPYV

SEQ ID NO: 577 - protein, 9 aa, synthetic construct
  REGION 1..9: note = Description of Artificial Sequence: Synthetic peptide
ARDWDYMDV

SEQ ID NO: 578 - protein, 20 aa, synthetic construct
  REGION 1..20: note = Description of Artificial Sequence: Synthetic peptide
ARDLSRGANPHYYYYYGMDV

SEQ ID NO: 579 - protein, 18 aa, synthetic construct
  REGION 1..18: note = Description of Artificial Sequence: Synthetic peptide
ATESNLVSRHYYYYGMDV

SEQ ID NO: 580 - protein, 9 aa, synthetic construct
  REGION 1..9: note = Description of Artificial Sequence: Synthetic peptide
RSNIGAGYD

SEQ ID NO: 581 - protein, 13 aa, synthetic construct
  REGION 1..13: note = Description of Artificial Sequence: Synthetic peptide
QSYDNTVRESPYV

SEQ ID NO: 582 - protein, 8 aa, synthetic construct
  REGION 1..8: note = Description of Artificial Sequence: Synthetic peptide
GYTFTGYY

SEQ ID NO: 583 - protein, 8 aa, synthetic construct
  REGION 1..8: note = Description of Artificial Sequence: Synthetic peptide
INPNSGGT

SEQ ID NO: 584 - protein, 25 aa, synthetic construct
  REGION 1..25: note = Description of Artificial Sequence: Synthetic peptide
ARDYGYYGSGSYSSGPLYYYYGMDV

SEQ ID NO: 585 - protein, 8 aa, synthetic construct
  REGION 1..8: note = Description of Artificial Sequence: Synthetic peptide
SSNIGSNS

SEQ ID NO: 586 - skipped

SEQ ID NO: 587 - protein, 16 aa, synthetic construct
  REGION 1..16: note = Description of Artificial Sequence: Synthetic peptide
AKDITYGSGSYGAFDI

SEQ ID NO: 588 - protein, 6 aa, synthetic construct
  REGION 1..6: note = Description of Artificial Sequence: Synthetic peptide
DIGSKS

SEQ ID NO: 589 - protein, 8 aa, synthetic construct
  REGION 1..8: note = Description of Artificial Sequence: Synthetic peptide
GGTFSSNS

SEQ ID NO: 590 - protein, 8 aa, synthetic construct
  REGION 1..8: note = Description of Artificial Sequence: Synthetic peptide
IFPILGIT

SEQ ID NO: 591 - protein, 13 aa, synthetic construct
  REGION 1..13: note = Description of Artificial Sequence: Synthetic peptide
ARGNYQWYDAFDI

SEQ ID NO: 592 - protein, 9 aa, synthetic construct
  REGION 1..9: note = Description of Artificial Sequence: Synthetic peptide
QSYDSTSVL

SEQ ID NO: 593 - DNA, 747 bp, synthetic construct
  misc_feature 1..747: note = Description of Artificial Sequence: Synthetic polynucleotide
  source 1..747: mol_type = other DNA
cagtctgtgttgacgcagccaccctcagcgtctgggacccccgggcagagggtcaccatctcttgttctggaagcagctccaacatcggaagtaatactgtaaactggtaccagcagctcccaggaacggcccccaaactcctcatctatagtaataatcagcggccctcaggggtccctgaccgattctctggctccaagtctggcacctcagcctccctggccatcagtgggctccagtctgaggatgaggctgattattactgtgcagcatgggatgacagcctgaatggttatgtcttcggaactgggaccaaggtcaccgtcctaggttctagaggtggtggtggtagcggcggcggcggctctggtggtggtggatccctcgagatggcccaggtgcagctacagcagtggggcgcaggactgttgaagccttcggagaccctgtccctcacctgcgctgtgtatggtgggtccttcagtggttactactggagctggatccgccagcccccagggaaggggctggagtggattggggaaatcaatcatagtggaagcaccaactacaacccgtccctcaagagtcgagtcaccatatcagtagacacgtccaagaaccagttctccctgaagctgagctctgtgaccgccgcggacacggccgtgtattactgtgcgcgcgaaggtccgtacgacggtttcgattcttggggtcaaggtactctggtgaccgtctcctca

SEQ ID NO: 594 - protein, 249 aa, synthetic construct
  REGION 1..249: note = Description of Artificial Sequence: Synthetic polypeptide
QSVLTQPPSASGTPGQRVTISCSGSSSNIGSNTVNWYQQLPGTAPKLLIYSNNQRPSGVPDRFSGSKSGTSASLAISGLQSEDEADYYCAAWDDSLNGYVFGTGTKVTVLGSRGGGGSGGGGSGGGGSLEMAQVQLQQWGAGLLKPSETLSLTCAVYGGSFSGYYWSWIRQPPGKGLEWIGEINHSGSTNYNPSLKSRVTISVDTSKNQFSLKLSSVTAADTAVYYCAREGPYDGFDSWGQGTLVTVSS

SEQ ID NO: 595 - DNA, 747 bp, synthetic construct
  misc_feature 1..747: note = Description of Artificial Sequence: Synthetic polynucleotide
  source 1..747: mol_type = other DNA
aattttatgctgactcagccccactctgtgtcggagtctccggggaagacggtaaccatctcctgcacccgcagcagtggcagcattgccagcaactatgtgcagtggtaccagcagcgcccgggcagtgcccccaccactgtgatctatgaggataaccaaagaccctctggggtccctgatcggttctctggctccatcgacagctcctccaactctgcctccctcaccatctctggactgaagactgaggacgaggctgactactactgtcagtcttatgatagcagcaattctgtggtattcggcggagggaccaagctgaccgtcctaggttctagaggtggtggtggtagcggcggcggcggctctggtggtggtggatccctcgagatggcccaggtccagctggtacagtctggcactgaggtgaagaagcctggggcctcagtgagggtcgcctgcaaggcttctggttacccctttaacaaatatgacatcaactgggtgcgacaggcccctggacaagggcttgagtggatgggaggcatcatccctatctttcgtacaacaaactacgcacagaagttccagggcagagtcacgattaccgcggacgaatccacgagcacagcctacatggagctgagcagcctgagatctgaggacacggccgtatattactgtgcgcgcgaatggttctactgggatatctggggtcaaggtactctggtgaccgtctcctca

SEQ ID NO: 596 - protein, 249 aa, synthetic construct
  REGION 1..249: note = Description of Artificial Sequence: Synthetic polypeptide
NFMLTQPHSVSESPGKTVTISCTRSSGSIASNYVQWYQQRPGSAPTTVIYEDNQRPSGVPDRFSGSIDSSSNSASLTISGLKTEDEADYYCQSYDSSNSVVFGGGTKLTVLGSRGGGGSGGGGSGGGGSLEMAQVQLVQSGTEVKKPGASVRVACKASGYPFNKYDINWVRQAPGQGLEWMGGIIPIFRTTNYAQKFQGRVTITADESTSTAYMELSSLRSEDTAVYYCAREWFYWDIWGQGTLVTVSS

SEQ ID NO: 597 - DNA, 750 bp, synthetic construct
  misc_feature 1..750: note = Description of Artificial Sequence: Synthetic polynucleotide
  source 1..750: mol_type = other DNA
cagtctgtgttgactcagccaccctcagtgtccgtgtccccaggacagacagccagcatctcctgctctggaaataaattggggactaagtatgtttactggtatcagaagaggccaggccagtcccctgtgttggtcatgtatgaagataatcagcggccctcagggatcccggagcggttctctggctccaactctgggaacacagccactctgaccatcagagggacccagactgtggatgaggctgactattactgtcaggcgtgggactccgacactttcgtggtcttcggcggagggaccaaggtcaccgtcctaggttctagaggtggtggtggtagcggcggcggcggctctggtggtggtggatccctcgagatggccgaggtgcagctggtggagaccgggggaggcgtggtccagcctgggaggtccctgagactctcctgtgcagcctctggattcaccttcagtagttatggcatgcactgggtccgccaggctccaggcaaggggctggagtgggtggcagttatatcacatgatggaagtaataaatactacgcagactccgtgaagggccgattcaccatctccagagacaattccaaggacacgctgtatctgcaaatgaacagcctgagaggtgaggacacggccgtatattactgtgcgcgctctaaccagtggtctggttacttctctttcgattactggggtcaaggtactctggtgaccgtctcctca

SEQ ID NO: 598 - protein, 250 aa, synthetic construct
  REGION 1..250: note = Description of Artificial Sequence: Synthetic polypeptide
QSVLTQPPSVSVSPGQTASISCSGNKLGTKYVYWYQKRPGQSPVLVMYEDNQRPSGIPERFSGSNSGNTATLTIRGTQTVDEADYYCQAWDSDTFVVFGGGTKVTVLGSRGGGGSGGGGSGGGGSLEMAEVQLVETGGGVVQPGRSLRLSCAASGFTFSSYGMHWVRQAPGKGLEWVAVISHDGSNKYYADSVKGRFTISRDNSKDTLYLQMNSLRGEDTAVYYCARSNQWSGYFSFDYWGQGTLVTVSS

SEQ ID NO: 599 - DNA, 744 bp, synthetic construct
  misc_feature 1..744: note = Description of Artificial Sequence: Synthetic polynucleotide
  source 1..744: mol_type = other DNA
tcctatgtgctgactcagccaccctcagtgtcagtggccccaggaaagacggccaggattacctgtgggggaaacaacattggaagtaaaagtgtgcactggtaccagcagaagccaggccaggcccctgtggtggtcatccattatgatagcgaccggccctcagggatccctgagcgattctctggctccaactctgggaacacggccaccctgaccatcagcagggtcgaagccggggatgaggccgactattactgtcaggtgtgggatagtagtagtgatcatccttatgtcttcggaactgggaccaaggtcaccgtcctaggttctagaggtggtggtggtagcggcggcggcggctctggtggtggtggatccctcgagatggccgaggtgcagctggtgcagtctggagctgaggtgaagaagcctggggcctcagtgaaggtctcctgcaaggcttctggttacacctttaccacctatggtatcagctgggtgcgacaggcccctggacaagggcttgagtggatgggatggatcaacacttacaatggtcacacaaactatgcacagaagctccagggcagagccacaatgaccgcagacacatccacgaacacagcctacatggagctgaggagcctgagatctgacgacactgccgtgtattactgtgcgcgcgttatctacggttctggtgattactggggtcaaggtactctggtgaccgtctcctca

SEQ ID NO: 600 - protein, 248 aa, synthetic construct
  REGION 1..248: note = Description of Artificial Sequence: Synthetic polypeptide
SYVLTQPPSVSVAPGKTARITCGGNNIGSKSVHWYQQKPGQAPVVVIHYDSDRPSGIPERFSGSNSGNTATLTISRVEAGDEADYYCQVWDSSSDHPYVFGTGTKVTVLGSRGGGGSGGGGSGGGGSLEMAEVQLVQSGAEVKKPGASVKVSCKASGYTFTTYGISWVRQAPGQGLEWMGWINTYNGHTNYAQKLQGRATMTADTSTNTAYMELRSLRSDDTAVYYCARVIYGSGDYWGQGTLVTVSS

SEQ ID NO: 601 - DNA, 738 bp, synthetic construct
  misc_feature 1..738: note = Description of Artificial Sequence: Synthetic polynucleotide
  source 1..738: mol_type = other DNA
tcctatgtgctgactcagccactctcagtgtcagtggccccaggaaagacggccaggattacctgtgggggaaacaacattggaagtaaaactgtgcactggtaccagcagaagccaggccaggcccctgtgctggtcatctattatgatagcgaccggccctcagggatccctgagcgattctctggctccaactctgggaacacggccaccctgaccatcagcagggtcgaagccggggatgaggccgactattactgtcaggtgtgggatagtagtagtgatcatcgggtgttcggcggagggaccaagctgaccgtcctaggttctagaggtggtggtggtagcggcggcggcggctctggtggtggtggatccctcgagatggcccaggtgcagctgcaggagtcgggcccaggactggtgaagccttcggagaccctgtccctcacctgcaatgtctctggttactccatcagcagtggttacttttggggctggatccggcagcccccagggaaggggctggagtggattgggagtatctatcatagtaggagcacctactacaacccgtccctcaagagtcgagtcaccatatcagtagacacgtccaagaaccagttctccctgaagctgaactctgtgaccgccgcagacacggccgtgtattactgtgcgcgcggttacggttacttcgattactggggtcaaggtactctggtgaccgtctcctca

SEQ ID NO: 602 - protein, 246 aa, synthetic construct
  REGION 1..246: note = Description of Artificial Sequence: Synthetic polypeptide
SYVLTQPLSVSVAPGKTARITCGGNNIGSKTVHWYQQKPGQAPVLVIYYDSDRPSGIPERFSGSNSGNTATLTISRVEAGDEADYYCQVWDSSSDHRVFGGGTKLTVLGSRGGGGSGGGGSGGGGSLEMAQVQLQESGPGLVKPSETLSLTCNVSGYSISSGYFWGWIRQPPGKGLEWIGSIYHSRSTYYNPSLKSRVTISVDTSKNQFSLKLNSVTAADTAVYYCARGYGYFDYWGQGTLVTVSS

SEQ ID NO: 603 - DNA, 759 bp, synthetic construct
  misc_feature 1..759: note = Description of Artificial Sequence: Synthetic polynucleotide
  source 1..759: mol_type = other DNA
caatctgccctgactcagcctgcctccgtgtctgggtctcctggacagtcgatcaccatctcctgcactggaaccagcagtgacgttggtggttataactatgtctcctggtaccaacaacacccaggcaaagcccccaaactcatgatttatgatgtcagtaatcggccctcaggggtttctaatcgcttctctggctccaagtctggcaacacggcctccctgaccatctctgggctccaggctgaggacgaggctgattattactgcagctcatatacaagcagcagcacttcgaaggtgttcggcggagggaccaagctgaccgtcctaggttctagaggtggtggtggtagcggcggcggcggctctggtggtggtggatccctcgagatggccgaggtgcagctggtggagtctgggggaggtgtggtacggcctggggggtccctgagactctcctgtgcagcctctggattcacctttggtgattatggcatgagctgggtccgccaagctccagggaaggggctggagtgggtctctggtattaattggaatggtggtagcacaggttatgcagactctgtgaagggccgattcaccatctccagagacaacgccaagaactccctgtatctgcaaatgaacagtctgagagccgaggacacggccgtatattactgtgcgcgctctaaatacaacttccatgtttactacgattactggggtcaaggtactctggtgaccgtctcctca

SEQ ID NO: 604 - protein, 253 aa, synthetic construct
  REGION 1..253: note = Description of Artificial Sequence: Synthetic polypeptide
QSALTQPASVSGSPGQSITISCTGTSSDVGGYNYVSWYQQHPGKAPKLMIYDVSNRPSGVSNRFSGSKSGNTASLTISGLQAEDEADYYCSSYTSSSTSKVFGGGTKLTVLGSRGGGGSGGGGSGGGGSLEMAEVQLVESGGGVVRPGGSLRLSCAASGFTFGDYGMSWVRQAPGKGLEWVSGINWNGGSTGYADSVKGRFTISRDNAKNSLYLQMNSLRAEDTAVYYCARSKYNFHVYYDYWGQGTLVTVSS

SEQ ID NO: 605 - DNA, 756 bp, synthetic construct
  misc_feature 1..756: note = Description of Artificial Sequence: Synthetic polynucleotide
  source 1..756: mol_type = other DNA
cagtctgtgttgacgcagccaccctcagcgtctgggacccccgggcagacagtcaccatctcttgttctggaagcaactccaacatcggaagtaattatgtatactggtaccagcagctcccaggaacggcccccaaactcctcatctataggaataatcagcggccctcaggggtccctgaccgattctcaggctccaagtctggcacctcagcctccctggccatcagtgggctccgctccgaggatgaggctgattattactgtgcagcatgggatgacagcctgagtgcttatgtcttcggaactgggaccaaggtcaccgtcctaggttctagaggtggtggtggtagcggcggcggcggctctggtggtggtggatccctcgagatggcccaggtgcagctggtgcagtctggagctgaggtgaagaagcctggggcctcagtgaaggtctcctgcaaggcttctggttacacctttaccagctatggtatcagctgggtgcgacaggcccctggacaagggcttgagtggatgggatggatcagcgcttacaatggtaacacaaactatgcacagaagctccagggcagagtcaccatgaccacagacacatccacgagcacagcctacatggagctgaggagcctgagatctgacgacactgccgtgtattactgtgcgcgctcttctggtaacatggtttcttggaaagatatgtggggtcaaggtactctggtgaccgtctcctca

SEQ ID NO: 606 - protein, 252 aa, synthetic construct
  REGION 1..252: note = Description of Artificial Sequence: Synthetic polypeptide
QSVLTQPPSASGTPGQTVTISCSGSNSNIGSNYVYWYQQLPGTAPKLLIYRNNQRPSGVPDRFSGSKSGTSASLAISGLRSEDEADYYCAAWDDSLSAYVFGTGTKVTVLGSRGGGGSGGGGSGGGGSLEMAQVQLVQSGAEVKKPGASVKVSCKASGYTFTSYGISWVRQAPGQGLEWMGWISAYNGNTNYAQKLQGRVTMTTDTSTSTAYMELRSLRSDDTAVYYCARSSGNMVSWKDMWGQGTLVTVSS

SEQ ID NO: 607 - DNA, 747 bp, synthetic construct
  misc_feature 1..747: note = Description of Artificial Sequence: Synthetic polynucleotide
  source 1..747: mol_type = other DNA
caatctgccctgactcagcctgcctccgtgtctgggtctcctggacagtcgatcaccatctcctgcactggaaccagcagtgacgttggtggttataactctgtctcctggtaccaacaacacccaggcaaagcccccagactcatgatttatgatgtcagtaatcggccctcaggggtttctaatcgcttctctggctccaagtctggcaacacggcctccctgaccatctctgggctccaggctgaggacgaggctgattattactgcagctcatatacaagcagcagcacccctttagtcttcggaactgggaccaaggtcaccgtcctaggttctagaggtggtggtggtagcggcggcggcggctctggtggtggtggatccctcgagatggcccaggtgcagctggtgcagtctggggctgaggtgaagaagcctggggcctcagtgaaggtctcctgcaaggcttctggttacacctttaccagctatggtatcagctgggtgcgacaggcccctggacaagggcttgagtggatgggatggatcagcgcttacaatggtaacacaaactatgcacagaagctccagggcagagtcaccatgaccacagacacatccacgagcacagcctacatggagctgaggagcctgagatctgacgacacggccgtgtattactgtgcgcgcggtgctgttgcttaccatgattggggtcaaggtactctggtgaccgtctcctca

SEQ ID NO: 608 - protein, 249 aa, synthetic construct
  REGION 1..249: note = Description of Artificial Sequence: Synthetic polypeptide
QSALTQPASVSGSPGQSITISCTGTSSDVGGYNSVSWYQQHPGKAPRLMIYDVSNRPSGVSNRFSGSKSGNTASLTISGLQAEDEADYYCSSYTSSSTPLVFGTGTKVTVLGSRGGGGSGGGGSGGGGSLEMAQVQLVQSGAEVKKPGASVKVSCKASGYTFTSYGISWVRQAPGQGLEWMGWISAYNGNTNYAQKLQGRVTMTTDTSTSTAYMELRSLRSDDTAVYYCARGAVAYHDWGQGTLVTVSS

SEQ ID NO: 609 - DNA, 750 bp, synthetic construct
  misc_feature 1..750: note = Description of Artificial Sequence: Synthetic polynucleotide
  source 1..750: mol_type = other DNA
cagtctgtcgtgacgcagccgccctcagtgtctgcggccccaggacagagggtcaccatctcctgctctggaagcagctccaacatttcgatttatgatgtatcctggtatcagcagctcccaggaacagcccccaaactcctcatttatggcaataataagcgaccctcggggattgctgaccgattctctggctccacgtctggcacgtcagccaccctgggcatcaccggactccagactggggacgaggccgattattactgcggaacatgggatgacagtctgagtgggggggtgttcggcggagggaccaagctgaccgtcctaggttctagaggtggtggtggtagcggcggcggcggctctggtggtggtggatccctcgagatggcccagatgcagctggtgcaatctggggctgaggtgaagaagcctgggtcctcggtgaaggtctcctgcgaggcttctggaggcaccctcagcagctatgctatcaactgggtgcgacaggcccctggacaagggcttgagtggatgggagggatcatccctatgtttggtacagcacactacgcacagaagttccagggcagagtcacgattaccgcggacgaatccacgaaaacagcctacatggagctgagcagcctgagatctgaggacactgccgtgtattactgtgcgcgcggtgttcattacgcttctttcgatcattggggtcaaggtactctggtgaccgtctcctca

SEQ ID NO: 610 - protein, 250 aa, synthetic construct
  REGION 1..250: note = Description of Artificial Sequence: Synthetic polypeptide
QSVVTQPPSVSAAPGQRVTISCSGSSSNISIYDVSWYQQLPGTAPKLLIYGNNKRPSGIADRFSGSTSGTSATLGITGLQTGDEADYYCGTWDDSLSGGVFGGGTKLTVLGSRGGGGSGGGGSGGGGSLEMAQMQLVQSGAEVKKPGSSVKVSCEASGGTLSSYAINWVRQAPGQGLEWMGGIIPMFGTAHYAQKFQGRVTITADESTKTAYMELSSLRSEDTAVYYCARGVHYASFDHWGQGTLVTVSS

SEQ ID NO: 611 - DNA, 747 bp, synthetic construct
  misc_feature 1..747: note = Description of Artificial Sequence: Synthetic polynucleotide
  source 1..747: mol_type = other DNA
cagtctgtgttgacgcagccgccctcagtgtctgcggccgcaggacagaaggtcaccatctcctgctctggaagcgactccaacattgggaataattatgtgtcctggtatcaacacctcccagggacagcccccaaactcctcatttatgacgttaaaaatcgaccctcagggattcctgaccggttctccggctccaagtctggctcgtcagccaccctaggcatcgccggactccagcctggggacgaggccgattattactgcggaacatgggacagtcggctggatgcctatgtcttcggaactgggaccaaggtcaccgtcctaggttctagaggtggtggtggtagcggcggcggcggctctggtggtggtggatccctcgagatggcccagatgcagctggtgcaatctggagctgaggtgaagaagcctggggcctcagtgaaggtctcctgcaagacttctggtttcccctttaatatctttggaatcacctgggtgcgacaggcccctggacaagggcttgagtggatgggatggatcagcggttacaacggtaacacagactacccacagaagttccagggcagagtcaccatgtccacagacacatccacgagtacagcctacatggagctgaggaacctgaaatctgacgacacggccgtgtattactgtgcgcgcggtgcttacggtggtatggatacttggggtcaaggtactctggtgaccgtctcctca

SEQ ID NO: 612 - protein, 249 aa, synthetic construct
  REGION 1..249: note = Description of Artificial Sequence: Synthetic polypeptide
QSVLTQPPSVSAAAGQKVTISCSGSDSNIGNNYVSWYQHLPGTAPKLLIYDVKNRPSGIPDRFSGSKSGSSATLGIAGLQPGDEADYYCGTWDSRLDAYVFGTGTKVTVLGSRGGGGSGGGGSGGGGSLEMAQMQLVQSGAEVKKPGASVKVSCKTSGFPFNIFGITWVRQAPGQGLEWMGWISGYNGNTDYPQKFQGRVTMSTDTSTSTAYMELRNLKSDDTAVYYCARGAYGGMDTWGQGTLVTVSS

SEQ ID NO: 613 - DNA, 753 bp, synthetic construct
  misc_feature 1..753: note = Description of Artificial Sequence: Synthetic polynucleotide
  source 1..753: mol_type = other DNA
cagtctgtcgtgacgcagccgccctcagtgtctggggccccagggcagagggtcaccatctcctgcactgggagcacctccaacatcggggcaggttatgatgtacactggtatcagcagcttccaggaacagcccccaaactcctcatctatactaacaactttcggccctcaggggtccctgaccgattctctgcctccaagtctggcacttcagcttccctggccatcactggtctccaggctgaggatgaggctgattattactgcggaacatgggatagcagcctgagtgccgttgtgttcggcggagggaccaagctgaccgtcctaggttctagaggtggtggtggtagcggcggcggcggctctggtggtggtggatccctcgagatggccgaggtgcagctggtggagtctggaactgaggtgaagaagcctggggcctcagtgaaagtctcctgcaaggcttctggttacatgtttaccagttatggtctcaactgggtgcgacaggcccctggacaagggcttgagtggatgggatggatcagcgctaacaatggtaagacaaattatgctaagaaattccaggacagagtcaccatgaccagagacacttccacgagcacaggctacatggaactgaggagcctgagatctgacgacacggccgtatattactgtgcgcgccatatcggtggttcttacttcgatcgttggggtcaaggtactctggtgaccgtctcctca

SEQ ID NO: 614 - protein, 251 aa, synthetic construct
  REGION 1..251: note = Description of Artificial Sequence: Synthetic polypeptide
QSVVTQPPSVSGAPGQRVTISCTGSTSNIGAGYDVHWYQQLPGTAPKLLIYTNNFRPSGVPDRFSASKSGTSASLAITGLQAEDEADYYCGTWDSSLSAVVFGGGTKLTVLGSRGGGGSGGGGSGGGGSLEMAEVQLVESGTEVKKPGASVKVSCKASGYMFTSYGLNWVRQAPGQGLEWMGWISANNGKTNYAKKFQDRVTMTRDTSTSTGYMELRSLRSDDTAVYYCARHIGGSYFDRWGQGTLVTVSS

SEQ ID NO: 615 - DNA, 747 bp, synthetic construct
  misc_feature 1..747: note = Description of Artificial Sequence: Synthetic polynucleotide
  source 1..747: mol_type = other DNA
tcctatgtgctgactcagccaccctcagtgtcagtggccccaggaaagacggccaggattacctgtgggggaaacaacattggaagtaaaagtgtgcactggtaccagcagaagccaggccaggcccctgtgctggtcatctattatgatagcgaccggccctcagggatccctgagcgattctctggctccaactctgggaacacggccaccctgaccatcagcagggtcgaagccggggatgaggccgactattactgtcaggtgtgggatagtagtagtgatcattatgtcttcggaactgggaccaaggtcaccgtcctaggttctagaggtggtggtggtagcggcggcggcggctctggtggtggtggatccctcgagatggccgaggtgcagctggtggagactgggggaggcttggtacagcctggggggtccctgagactctcctgtgcagcctctggattcacctttagcagctatgccatgagctgggtccgccaggctccagggaaggggctggagtgggtctcagctattagtggtagtgatggtagcacatactacgcagactccgtgaagggccggttcaccatctccagagacaattccaagaacacgctgtatctgcaaatgaacagcctgagagacgaggacacggccgtatattactgtgcgcgctctcatgaagctaacctggttggtgattggtggggtcaaggtactctggtgaccgtctcctca

SEQ ID NO: 616 - protein, 249 aa, synthetic construct
  REGION 1..249: note = Description of Artificial Sequence: Synthetic polypeptide
SYVLTQPPSVSVAPGKTARITCGGNNIGSKSVHWYQQKPGQAPVLVIYYDSDRPSGIPERFSGSNSGNTATLTISRVEAGDEADYYCQVWDSSSDHYVFGTGTKVTVLGSRGGGGSGGGGSGGGGSLEMAEVQLVETGGGLVQPGGSLRLSCAASGFTFSSYAMSWVRQAPGKGLEWVSAISGSDGSTYYADSVKGRFTISRDNSKNTLYLQMNSLRDEDTAVYYCARSHEANLVGDWWGQGTLVTVSS

SEQ ID NO: 617 - DNA, 741 bp, synthetic construct
  misc_feature 1..741: note = Description of Artificial Sequence: Synthetic polynucleotide
  source 1..741: mol_type = other DNA
cagtctgtggtgactcagccaccctcagtgtcagtggccccaggaaagacggccaggattacctgtgggggaaacaacattggaagtaaaagtgtgcactggtaccagcagaagccaggccaggcccctgtgctggtcatctattatgatagcgaccggccctcagggatccctgagcgattctctggctccaactctgggaacacggccaccctgaccatcagcagggtcgaagccggggatgaggccgactattactgtcaggtgtgggatagtagtagtgatgtggtattcggcggagggaccaagctgaccgtcctaggttctagaggtggtggtggtagcggcggcggcggctctggtggtggtggatccctcgagatggccgaggtccagctggtacagtctggagctgaggtgaagaagcctggggcctcagtgaaggtctcctgcaaggcttctggttacacctttaccagctacggtatcagctgggtgcgacaggcccctggacaagggcttgagtggatgggatggatcagcgcttacaatggtaacacaaactatgcacagaagctccagggcagagtcaccatgaccacagacacatccacgagcacagcctacatggagctgaggagcctgagatctgacgacacggccgtgtattactgtgcgcgctggggtggtttcggtgctgttgatcattggggtcaaggtactctggtgaccgtctcctca

SEQ ID NO: 618 - protein, 247 aa, synthetic construct
  REGION 1..247: note = Description of Artificial Sequence: Synthetic polypeptide
QSVVTQPPSVSVAPGKTARITCGGNNIGSKSVHWYQQKPGQAPVLVIYYDSDRPSGIPERFSGSNSGNTATLTISRVEAGDEADYYCQVWDSSSDVVFGGGTKLTVLGSRGGGGSGGGGSGGGGSLEMAEVQLVQSGAEVKKPGASVKVSCKASGYTFTSYGISWVRQAPGQGLEWMGWISAYNGNTNYAQKLQGRVTMTTDTSTSTAYMELRSLRSDDTAVYYCARWGGFGAVDHWGQGTLVTVSS

SEQ ID NO: 619 - DNA, 735 bp, synthetic construct
  misc_feature 1..735: note = Description of Artificial Sequence: Synthetic polynucleotide
  source 1..735: mol_type = other DNA
tcttctgagctgactcaggaccctgctgtgtctgtggccttgggacagacagtcaagatcacgtgccaaggagacagcctcacagactaccatgcaacctggtaccagcagaagccaggacaggcccctgtcgctgtcatctatgctacaaacaaccggcccactgggatcccagaccgattctctggttccagttccggaaacacagcttctttgaccatcactggggctcaggcggaagatgaggctgactattactgtaattcccgggacagcggcacggacgaagtgttattcggcggagggaccaagctgaccgtcctaggttctagaggtggtggtggtagcggcggcggcggctctggtggtggtggatccctcgagatggccgaggtgcagctggtggagactgggggaggcctggtcaagcctggggggtccctgagactctcctgtgcagcctctggattcaccttcagtagctatagcatgaactgggtccgccaggctccagggaaggggctggagtgggtctcatccattagtagtagtagtagttacatatactacgcagactcagtgaagggccgattcaccatctccagagacaacgccaagaactcactgtatctgcaaatgaacagcctgagagccgaggacacggccgtgtattactgtgcgcgcggtcagggttacgattactggggtcaaggtactctggtgaccgtctcctca

SEQ ID NO: 620 - protein, 245 aa, synthetic construct
  REGION 1..245: note = Description of Artificial Sequence: Synthetic polypeptide
SSELTQDPAVSVALGQTVKITCQGDSLTDYHATWYQQKPGQAPVAVIYATNNRPTGIPDRFSGSSSGNTASLTITGAQAEDEADYYCNSRDSGTDEVLFGGGTKLTVLGSRGGGGSGGGGSGGGGSLEMAEVQLVETGGGLVKPGGSLRLSCAASGFTFSSYSMNWVRQAPGKGLEWVSSISSSSSYIYYADSVKGRFTISRDNAKNSLYLQMNSLRAEDTAVYYCARGQGYDYWGQGTLVTVSS

SEQ ID NO: 621 - DNA, 735 bp, synthetic construct
  misc_feature 1..735: note = Description of Artificial Sequence: Synthetic polynucleotide
  source 1..735: mol_type = other DNA
tcctatgtgctgactcagccaccctcggtgtcagtggccccaggaaagacggccaggattacctgtgggggaaacaacattggaagtaaaagtgtgcactggtaccagcagaagccaggccaggcccctgtgctggtcgtctatgatgatagcgaccggccctcagggatccctgagcgattctctggctccaactctgggaacacggccaccctgagcatcagcagggtcgaagccggggatgaggccgactattactgtcaggtgtgggatagtagtagtgatcatactgtcttcggaactgggaccaaggtcaccgtcctaggttctagaggtggtggtggtagcggcggcggcggctctggtggtggtggatccctcgagatggcccaggtgcagctacagcagtggggcgcaggactgttgaagccttcggagaccctgtccctcacctgcgctgtctatggtgggtccttcagtggttactactggagctggatccgccagcccccagggaaggggctggagtggattggggaaatcaatcatagtggaagcaccaactacaacccgtccctcaagagtcgagtcaccatatcagtagacacgtccaagaaccagttctccctgaagctgagctctgtgaccgccgcggacacggccgtgtattactgtgcgcgctactacccgggtatggatatgtggggtcaaggtactctggtgaccgtctcctca

SEQ ID NO: 622 - protein, 245 aa, synthetic construct
  REGION 1..245: note = Description of Artificial Sequence: Synthetic polypeptide
SYVLTQPPSVSVAPGKTARITCGGNNIGSKSVHWYQQKPGQAPVLVVYDDSDRPSGIPERFSGSNSGNTATLSISRVEAGDEADYYCQVWDSSSDHTVFGTGTKVTVLGSRGGGGSGGGGSGGGGSLEMAQVQLQQWGAGLLKPSETLSLTCAVYGGSFSGYYWSWIRQPPGKGLEWIGEINHSGSTNYNPSLKSRVTISVDTSKNQFSLKLSSVTAADTAVYYCARYYPGMDMWGQGTLVTVSS

SEQ ID NO: 623 - DNA, 741 bp, synthetic construct
  misc_feature 1..741: note = Description of Artificial Sequence: Synthetic polynucleotide
  source 1..741: mol_type = other DNA
caggctgtgctgactcagccgccctcaacgtctgggacccccgggcagagggtcaccatctcttgttctggaagcagctccaacatcgggagaaatggtgtaaactggtaccagcagctcccaggagcggcccccaaagtcctcatctataatgataatcagcgaccctcaggggtccctgaccgagtctctggctcccagtctggctcctcaggcaccctggccatcgatgggcttcggtctgaggatgaggctgattattactgtgcggcatgggatgacagcctgcatggtgtggtattcggcggagggaccaagctgaccgtcctaggttctagaggtggtggtggtagcggcggcggcggctctggtggtggtggatccctcgagatggcccaggtccagctggtacagtctggggctgaggtgaagaagcctggggcctcagtgaaggtctcctgcaaggtttccggatacaccctcaatgaattatccatgcactgggtgcgacaggctcctggaaaagggcttgagtggatgggaggttttgatcctgaagatggtgaaacaatctacgcacagaagttccagggcagagtcaccatgaccgaggacacatctacagacacagcctacatggagctgagcagcctgagatctgaggacactgccgtgtattactgtgcgcgcggtggttacggtgattcttggggtcaaggtactctggtgaccgtctcctca

SEQ ID NO: 624 - protein, 247 aa, synthetic construct
  REGION 1..247: note = Description of Artificial Sequence: Synthetic polypeptide
QAVLTQPPSTSGTPGQRVTISCSGSSSNIGRNGVNWYQQLPGAAPKVLIYNDNQRPSGVPDRVSGSQSGSSGTLAIDGLRSEDEADYYCAAWDDSLHGVVFGGGTKLTVLGSRGGGGSGGGGSGGGGSLEMAQVQLVQSGAEVKKPGASVKVSCKVSGYTLNELSMHWVRQAPGKGLEWMGGFDPEDGETIYAQKFQGRVTMTEDTSTDTAYMELSSLRSEDTAVYYCARGGYGDSWGQGTLVTVSS

SEQ ID NO: 625 - DNA, 795 bp, synthetic construct
  misc_feature 1..795: note = Description of Artificial Sequence: Synthetic polynucleotide
  source 1..795: mol_type = other DNA
aattttatgctgactcagccccactctgtgtcggagtctccggggaagacggtaaccatctcctgcacccgcagcagtggcagcattgccagcaactatgtgcagtggtaccagcagcgcccgggcagtgcccccaccactgtgatctatgaggataaccaaagaccctctggggtccctgatcggttctctggctccatcgacagctcctccaactctgcctccctcaccatctctggactgaagactgaggacgaggctgactactactgtcagtcttatgatagcagcaattcttgggtgttcggcggagggaccaagctgaccgtcctaggttctagaggtggtggtggtagcggcggcggcggctctggtggtggtggatccctcgagatggcccaggtgcagctggtgcaatctggggctgaggtgaagaggcctgggtcctcggtgaaggtctcctgcacggcttctggaggcaccttcagcagcgatgctatcagctgggtgcgacaggcccctggacaagggcttgagtggatgggaggaatcatccctatgtttggtacagcaaactacgcacagaagttccagggcagagtcacgattaccgcggacgaatccacgagcacagcctacatggagctgagcagcctgagatctgaggacacggccgtgtattactgtgcgcgcgaaggttactactacccgtctgcttacctgggttctgttctgaacgacatctcttctgtttacgatgaatggggtcaaggtactctggtgaccgtctcctca

SEQ ID NO: 626 - protein, 265 aa, synthetic construct
  REGION 1..265: note = Description of Artificial Sequence: Synthetic polypeptide
NFMLTQPHSVSESPGKTVTISCTRSSGSIASNYVQWYQQRPGSAPTTVIYEDNQRPSGVPDRFSGSIDSSSNSASLTISGLKTEDEADYYCQSYDSSNSWVFGGGTKLTVLGSRGGGGSGGGGSGGGGSLEMAQVQLVQSGAEVKRPGSSVKVSCTASGGTFSSDAISWVRQAPGQGLEWMGGIIPMFGTANYAQKFQGRVTITADESTSTAYMELSSLRSEDTAVYYCAREGYYYPSAYLGSVLNDISSVYDEWGQGTLVTVSS

SEQ ID NO: 627 - DNA, 747 bp, synthetic construct
  misc_feature 1..747: note = Description of Artificial Sequence: Synthetic polynucleotide
  source 1..747: mol_type = other DNA
cagtctgtcgtgacgcagccgccctcagtgtctgcggccccaggacagaaggtcaccatctcctgctctggaagcacctccaacattggaaataatgatgtatcctggtaccagcagctcccaggaacagcccccaaactcctcatttatgacaataataagcgaccctcagggattcctgaccgattctctggctccaagtctggcacgtcagccaccctgggcatcaccggactccagactggggacgaggccgattattactgcggaacatgggatagcagcgtgagtgcttcttgggtcttcggcagagggaccaagctgaccgtcctaggttctagaggtggtggtggtagcggcggcggcggctctggtggtggtggatccctcgagatggcccaggtgcagctggtgcagtctggagctgaggtgaagaagcctggggcctcagtgaaggtctcctgcaaggcttctggttacacctttaccagctatggtatcagctgggtgcgacaggcccctggacaagggcttgagtggatgggatggatcagcgcttacaatggtaacacaaactatccacagaagctccagggcagagtcaccatgaccacagacccatccacgagcacagcctacatggagctgaggagcctgagatctgacgacacggccgtgtattactgtgcgcgctctatgacttctttcgattactggggtcaaggtactctggtgaccgtctcctca

SEQ ID NO: 628 - protein, 249 aa, synthetic construct
  REGION 1..249: note = Description of Artificial Sequence: Synthetic polypeptide
QSVVTQPPSVSAAPGQKVTISCSGSTSNIGNNDVSWYQQLPGTAPKLLIYDNNKRPSGIPDRFSGSKSGTSATLGITGLQTGDEADYYCGTWDSSVSASWVFGRGTKLTVLGSRGGGGSGGGGSGGGGSLEMAQVQLVQSGAEVKKPGASVKVSCKASGYTFTSYGISWVRQAPGQGLEWMGWISAYNGNTNYPQKLQGRVTMTTDPSTSTAYMELRSLRSDDTAVYYCARSMTSFDYWGQGTLVTVSS

SEQ ID NO: 629 - DNA, 747 bp, synthetic construct
  misc_feature 1..747: note = Description of Artificial Sequence: Synthetic polynucleotide
  source 1..747: mol_type = other DNA
cagtctgtgttgacgcagccgccctcagtgtctgcggccccaggacagaaggtcaccatctcctgctctggaagcaactccaacattgggaataattatgtatcctggtatcagcaactcccagggacagcccccaaactcctcatttatgacaataataagcgaccctcagggattcctgaccgattctctggctccaggtctggcacgtcagccaccctgggcatcaccggactccagactggggacgaggccgattattactgcggaacatggaataccactgtgactcctggctatgtcttcggaactgggaccaaggtcaccgtcctaggttctagaggtggtggtggtagcggcggcggcggctctggtggtggtggatccctcgagatggccgaagtgcagctggtgcagtctggagctgaggtgaagaagcctggggcctcagtgaaggtctcctgcaaggcttctggttacacctttaccagctatggtatcagctgggtgcgacaggcccctggacaagggcttgagtggatgggatggatcagcgcttacaatggtaacacaaactatgcacagaagctccagggcagagtcaccatgaccacagacacatccacgagcacagcctacatggagctgaggagcctgagatctgacgacaccgccatgtattactgtgcgcgctctgtttacgacctggatacttggggtcaaggtactctggtgaccgtctcctca

SEQ ID NO: 630 - protein, 249 aa, synthetic construct
  REGION 1..249: note = Description of Artificial Sequence: Synthetic polypeptide
QSVLTQPPSVSAAPGQKVTISCSGSNSNIGNNYVSWYQQLPGTAPKLLIYDNNKRPSGIPDRFSGSRSGTSATLGITGLQTGDEADYYCGTWNTTVTPGYVFGTGTKVTVLGSRGGGGSGGGGSGGGGSLEMAEVQLVQSGAEVKKPGASVKVSCKASGYTFTSYGISWVRQAPGQGLEWMGWISAYNGNTNYAQKLQGRVTMTTDTSTSTAYMELRSLRSDDTAMYYCARSVYDLDTWGQGTLVTVSS

SEQ ID NO: 631 - DNA, 756 bp, synthetic construct
  misc_feature 1..756: note = Description of Artificial Sequence: Synthetic polynucleotide
  source 1..756: mol_type = other DNA
cagtctgtcgtgacgcagccgccctcagtgtctgcggccccaggacagaaggtcaccatctcctgctctggaagcagctccaacattgggaataattatgtatcctggtaccagcagctcccaggaacagcccccaaactcctcatttatgacaataataagcgaccctcagggattcctgaccgattctctggctccaagtctggcacgtcagccaccctgggcatcaccggactccagactggggacgaggccgattattactgcggaacatgggatagcagcctgggggccccttatgtcttcggaactgggaccaaggtcaccgtcctaggttctagaggtggtggtggtagcggcggcggcggctctggtggtggtggatccctcgagatggccgaggtgcagctggtgcagtcttggggaggctcggaacagcctggcaggtccctgagactctcctgtgcagcctctggattcacctttgatgattatgccatgcactgggtccggcaagctccagggaagggcctggagtgggtctcaggtattagttggaatagcggtagcataggctatgcggactctgtgaagggccgattcaccatctccagagacaacgccaagaattccctgtatctgcaaatgaacagtctgagagctgaggacaccgccatgtattactgtgcgcgctaccgtcaggttggttctgcttacgattcttggggtcaaggtactctggtgaccgtctcctca

SEQ ID NO: 632 - protein, 252 aa, synthetic construct
  REGION 1..252: note = Description of Artificial Sequence: Synthetic polypeptide
QSVVTQPPSVSAAPGQKVTISCSGSSSNIGNNYVSWYQQLPGTAPKLLIYDNNKRPSGIPDRFSGSKSGTSATLGITGLQTGDEADYYCGTWDSSLGAPYVFGTGTKVTVLGSRGGGGSGGGGSGGGGSLEMAEVQLVQSWGGSEQPGRSLRLSCAASGFTFDDYAMHWVRQAPGKGLEWVSGISWNSGSIGYADSVKGRFTISRDNAKNSLYLQMNSLRAEDTAMYYCARYRQVGSAYDSWGQGTLVTVSS

SEQ ID NO: 633 - DNA, 747 bp, synthetic construct
  misc_feature 1..747: note = Description of Artificial Sequence: Synthetic polynucleotide
  source 1..747: mol_type = other DNA
ctgcctgtgctgactcagccaccctcggtgtcagtggccccaggaaagacggccaggattacctgtgggggaaacaacattggaagtaaaagtgtgcactggtatcagcagaagccaggccaggcccctgtgctggtcgtctatgctgatagcgaccggccctcagggatccctgagcgattctctggctccaactctgggaacacggccaccctgaccatcagcagggtcgaagccggggatgaggccgactattactgtcaggtgtgggatagtagtagttatcataattatgtcttcggaactgggaccaaggtcaccgtcctaggttctagaggtggtggtggtagcggcggcggcggctctggtggtggtggatccctcgagatggccgaggtgcagctggtgcagtctggagctgaggtgaagaagcctggggcctcagtgaaggtctcctgcaaggcttctggttacacctttaccagctatggtatcagctgggtgcgacaggcccctggacaagggcttgagtggatgggatggatcagcgcttacaatggtaacacaaactatgcacagaagctccagggcagagtcaccatgaccacagacacatccacgagcacagcctacatggagctgagcagcctgagatctgaggacaccgccatgtattactgtgcgcgctactggggtttcggtgtttctgatcgttggggtcaaggtactctggtgaccgtctcctca

SEQ ID NO: 634 - protein, 249 aa, synthetic construct
  REGION 1..249: note = Description of Artificial Sequence: Synthetic polypeptide
LPVLTQPPSVSVAPGKTARITCGGNNIGSKSVHWYQQKPGQAPVLVVYADSDRPSGIPERFSGSNSGNTATLTISRVEAGDEADYYCQVWDSSSYHNYVFGTGTKVTVLGSRGGGGSGGGGSGGGGSLEMAEVQLVQSGAEVKKPGASVKVSCKASGYTFTSYGISWVRQAPGQGLEWMGWISAYNGNTNYAQKLQGRVTMTTDTSTSTAYMELSSLRSEDTAMYYCARYWGFGVSDRWGQGTLVTVSS

SEQ ID NO: 635 - DNA, 750 bp, synthetic construct
  misc_feature 1..750: note = Description of Artificial Sequence: Synthetic polynucleotide
  source 1..750: mol_type = other DNA
aattttatgctgactcagccccactctgtgtcggagtctccggggaagacggtaaccatctcctgcaccggcagcagtggcagcattgccagcaactatgtgcagtggtaccagcagcgcccgggcagtgcccccaccactgtgatctatgaggataaccaaagaccctctggggtccccgatcggttctctggctccatcgacagctcctccaactctgcctccctcaccatctctggactgaagactgaggacgaggctgactactactgtcagtcttatgacagcagcaatctttgggtgttcggcggagggaccaagctgaccgtcctaggttctagaggtggtggtggtagcggcggcggcggctctggtggtggtggatccctcgagatggcccagatgcagctggtgcagtctggggctgaggtgaagaagcctgggtcctcggtgaaggtctcctgcaaggcttctggaggcaccttcagcagctatgctatcagctgggtgcgacaggcccctggacaagggcttgagtggatgggagggatcatccctatctttggtacagcaaactacgcacagaagttccagggcagagtcacgattaccgcggacgaatccacgagcacagcctacatggagctgagcagcctgagatctgaggacactgccgtgtattactgtgcgcgctacaactactactactacgattcttggggtcaaggtactctggtgaccgtctcctca

SEQ ID NO: 636 - protein, 250 aa, synthetic construct
  REGION 1..250: note = Description of Artificial Sequence: Synthetic polypeptide
NFMLTQPHSVSESPGKTVTISCTGSSGSIASNYVQWYQQRPGSAPTTVIYEDNQRPSGVPDRFSGSIDSSSNSASLTISGLKTEDEADYYCQSYDSSNLWVFGGGTKLTVLGSRGGGGSGGGGSGGGGSLEMAQMQLVQSGAEVKKPGSSVKVSCKASGGTFSSYAISWVRQAPGQGLEWMGGIIPIFGTANYAQKFQGRVTITADESTSTAYMELSSLRSEDTAVYYCARYNYYYYDSWGQGTLVTVSS

SEQ ID NO: 637 - DNA, 741 bp, synthetic construct
  misc_feature 1..741: note = Description of Artificial Sequence: Synthetic polynucleotide
  source 1..741: mol_type = other DNA
gacatccagatgacccagtctccatcctccctgtctgcatctgtaggagacagagtcaccatcacttgccgggcaagtcagagcattagcagctatttaaattggtatcagcagaaaccagggaaagcccctaagctcctgatctatgctgcatccagtttgcaaagtggggtcccatcaaggttcagtggcagtggatctgggacagatttcactctcaccatcagcagtctgcaacctgaagattttgcaacttactactgtcaacagagttacagtaccccattcactttcggccctgggaccaaagtggatatcaaacgttctagaggtggtggtggtagcggcggcggcggctctggtggtggtggatccctcgagatggccgaggtgcagctggtgcagtctggggctgaggtgaagaagcctgggtcctcggtgaaggtctcctgcaaggcttctggaggcaccttcagcagctatgctatcagctgggtgcgacaggcccctggacaagggcttgagtggatgggagggatcatccctatctttggtacagcaaactacgcacagaagttccagggcagagtcacgattaccgcggacgaatccacgagcacagcctacatggagctgagcagcctgagatctgaggacaccgccatgtattactgtgcgcgctactggggttacgactcttacgatgaatggggtcaaggtactctggtgaccgtctcctca

SEQ ID NO: 638 - protein, 247 aa, synthetic construct
  REGION 1..247: note = Description of Artificial Sequence: Synthetic polypeptide
DIQMTQSPSSLSASVGDRVTITCRASQSISSYLNWYQQKPGKAPKLLIYAASSLQSGVPSRFSGSGSGTDFTLTISSLQPEDFATYYCQQSYSTPFTFGPGTKVDIKRSRGGGGSGGGGSGGGGSLEMAEVQLVQSGAEVKKPGSSVKVSCKASGGTFSSYAISWVRQAPGQGLEWMGGIIPIFGTANYAQKFQGRVTITADESTSTAYMELSSLRSEDTAMYYCARYWGYDSYDEWGQGTLVTVSS

SEQ ID NO: 639 - DNA, 747 bp, synthetic construct
  misc_feature 1..747: note = Description of Artificial Sequence: Synthetic polynucleotide
  source 1..747: mol_type = other DNA
aattttatgctgactcagccccactctgtgtcggagtctccggggaagacggtaaccatctcctgcaccggcagcagtggcagcattgccagcaactatgtgcagtggtaccagcagcgcccgggcagtgcccccaccactgtgatctatgaggataaccaaagaccctctggggtccctgatcggttctctggctccatcgacagctcctccaactctgcctccctcaccatctctggactgaagactgaggacgaggctgactactactgtcagtcttatgatagcagcaattgggtgttcggcggagggaccaagctgaccgtcctaggttctagaggtggtggtggtagcggcggcggcggctctggtggtggtggatccctcgagatggccgaggtccagctggtgcagtctggggctgaggtgaagaagcctgggtcctcggtgaaggtctcctgcaaggcttctggaggcaccttcagcagctatgctatcagctgggtgcgacaggcccctggacaagggcttgagtggatgggagggatcatccctatctttggtacagcaaactacgcacagaagttccagggcagagtcacgattaccgcggacgaatccacgagcacagcctacatggagctgagcagcctgagatctgaggacacggccgtgtattactgtgcgcgcaacaaccattactacaacgattactggggtcaaggtactctggtgaccgtctcctca

SEQ ID NO: 640 - protein, 249 aa, synthetic construct
  REGION 1..249: note = Description of Artificial Sequence: Synthetic polypeptide
NFMLTQPHSVSESPGKTVTISCTGSSGSIASNYVQWYQQRPGSAPTTVIYEDNQRPSGVPDRFSGSIDSSSNSASLTISGLKTEDEADYYCQSYDSSNWVFGGGTKLTVLGSRGGGGSGGGGSGGGGSLEMAEVQLVQSGAEVKKPGSSVKVSCKASGGTFSSYAISWVRQAPGQGLEWMGGIIPIFGTANYAQKFQGRVTITADESTSTAYMELSSLRSEDTAVYYCARNNHYYNDYWGQGTLVTVSS

SEQ ID NO: 641 - DNA, 777 bp, synthetic construct
  misc_feature 1..777: note = Description of Artificial Sequence: Synthetic polynucleotide
  source 1..777: mol_type = other DNA
cagtctgtgttgacgcagccgccctcagtgtctggggccccagggcagggggtcaccatcccctgcactgggagcagctccaacatcggggcaggttatgatgtacactggtaccagcagcttccagggacagcccccaaactcctcatctatggtaacaacaatcggccctcaggggtccctgaccgcttctctggctccaggtctggctcctcagcctccctggccatcactgggctccaggctgaggatgaggctgattattactgccagtcctatgacagcagcctgagtgatgtggtattcggcggagggaccaaggtcaccgtcctaggttctagaggtggtggtggtagcggcggcggcggctctggtggtggtggatccctcgagatggccgaggtccagctggtgcagtctggggctgaggtgaagaagcctggggctacagtgaaaatctcctgcaaggtttctggatacaccttcaccgactactacatgcactgggtgcaacaggcccctggaaaagggcttgagtggatgggacttgttgatcctgaagatggtgaaacaatatacgcagagaagttccagggcagagtcaccataaccgcggacacgtctacagacacagcctacatggagctgagcagcctgagatctgaggacacggccgtgtattactgtgcgcgctactggtcttactctttcgactacctgtacatgccggaaggtaacgattggtggggtcaaggtactctggtgaccgtctcctca

SEQ ID NO: 642 - protein, 259 aa, synthetic construct
  REGION 1..259: note = Description of Artificial Sequence: Synthetic polypeptide
QSVLTQPPSVSGAPGQGVTIPCTGSSSNIGAGYDVHWYQQLPGTAPKLLIYGNNNRPSGVPDRFSGSRSGSSASLAITGLQAEDEADYYCQSYDSSLSDVVFGGGTKVTVLGSRGGGGSGGGGSGGGGSLEMAEVQLVQSGAEVKKPGATVKISCKVSGYTFTDYYMHWVQQAPGKGLEWMGLVDPEDGETIYAEKFQGRVTITADTSTDTAYMELSSLRSEDTAVYYCARYWSYSFDYLYMPEGNDWWGQGTLVTVSS

SEQ ID NO: 643 - DNA, 753 bp, synthetic construct
  misc_feature 1..753: note = Description of Artificial Sequence: Synthetic polynucleotide
  source 1..753: mol_type = other DNA
cagtctgtgttgactcagccacccgcagcgtctgggacccccggacagagagtcaccatctcttgttctgggggcgtctccaacatcgggagtggtgctctaaattggtaccagcaactcccaggaacggcccccaaactcctcatctatagttacaatcagcggccctcaggggtctctgaccgattctctggctccaggtctgccacctcagcctccctggccatcagtgggctccagtctgaggatgaggctgattattactgtgcaacctgggatgatagtgtgaatggttgggtgttcggcggagggaccaagctgaccgtcctaggttctagaggtggtggtggtagcggcggcggcggctctggtggtggtggatccctcgagatggcccaggtccagctggtacagtctggagctgaggtgaagaagcctggggattcagtgaaggtctcctgcaagccttctggttacaattttctcaactatggtatcaactgggtgcgacaggcccctggacaagggcttgagtggatgggatggattagcacttacaccggtaacacaaactatgcacagaagctgcagggcagagtcaccttcaccacagacacatccacgagcacagcctacatggagatgaggagcctgagatctgacgacacggccgtgtattactgtgcgcgcgacctgtactactacgaaggtgttgattactggggtcaaggtactctggtgaccgtctcctca

SEQ ID NO: 644 - protein, 251 aa, synthetic construct
  REGION 1..251: note = Description of Artificial Sequence: Synthetic polypeptide
QSVLTQPPAASGTPGQRVTISCSGGVSNIGSGALNWYQQLPGTAPKLLIYSYNQRPSGVSDRFSGSRSATSASLAISGLQSEDEADYYCATWDDSVNGWVFGGGTKLTVLGSRGGGGSGGGGSGGGGSLEMAQVQLVQSGAEVKKPGDSVKVSCKPSGYNFLNYGINWVRQAPGQGLEWMGWISTYTGNTNYAQKLQGRVTFTTDTSTSTAYMEMRSLRSDDTAVYYCARDLYYYEGVDYWGQGTLVTVSS

SEQ ID NO: 645 - DNA, 747 bp, synthetic construct
  misc_feature 1..747: note = Description of Artificial Sequence: Synthetic polynucleotide
  source 1..747: mol_type = other DNA
caggctgtgctgactcagccaccctcagtgtcagtggccccaggaaagacggccagggttacctgtgggggaaacaacattggaagtgaaagtgtgcactggtaccagcagaagccaggccaggcccctgtgttggtcatctattatgataccgaccggccctcagggatccctgagcgattctctggctcccactctgggaccacggccaccctgaccatcagcagggtcgaagccggggatgaggccgactattactgtcaggtgtgggatagtagtagggatcatgtggtattcggcggagggaccaagctgaccgtcctaggttctagaggtggtggtggtagcggcggcggcggctctggtggtggtggatccctcgagatggcccaggtgcagctggtgcagtctgggggaggcgtggtccagcctgggaggtccctgagactctcctgtgcggcctctggattcaccttcagtagctatgctatgcactgggtccgccaggctccaggcaagggactggagtgggtggcagttatatcatatgatggaagcaataaatactacgcagactccgtgaagggcctattcaccatctccagagacaattccaagaacacgctgtatctgcaaatgaacagcctgagagctgaggacacggccgtgtattactgtgcgcgctcttacttcacttctggtttctacgattactggggtcaaggtactctggtgaccgtctcctca

SEQ ID NO: 646 - protein, 249 aa, synthetic construct
  REGION 1..249: note = Description of Artificial Sequence: Synthetic polypeptide
QAVLTQPPSVSVAPGKTARVTCGGNNIGSESVHWYQQKPGQAPVLVIYYDTDRPSGIPERFSGSHSGTTATLTISRVEAGDEADYYCQVWDSSRDHVVFGGGTKLTVLGSRGGGGSGGGGSGGGGSLEMAQVQLVQSGGGVVQPGRSLRLSCAASGFTFSSYAMHWVRQAPGKGLEWVAVISYDGSNKYYADSVKGLFTISRDNSKNTLYLQMNSLRAEDTAVYYCARSYFTSGFYDYWGQGTLVTVSS

SEQ ID NO: 647 - DNA, 750 bp, synthetic construct
  misc_feature 1..750: note = Description of Artificial Sequence: Synthetic polynucleotide
  source 1..750: mol_type = other DNA
cagtctgtcgtgacgcagccgccctcagtgtctggggccccagggcagagggtcaccatctcctgcactgggagcagttccaacatcggggcaggttatgatgtaaattggtatcagcagtttccaggaacagcccccaaactcctcatctatggtaacagcaatcggccctcaggggtccctgaccgattctctggctccaagtctggcacctcagcctccctggccatcactgggctccaggctgaggatgaggctgattattactgccagtcctatgacagcagcctgagtggctcttatgtcttcggaactgggaccaaggtcaccgtcctaggttctagaggtggtggtggtagcggcggcggcggctctggtggtggtggatccctcgagatggcccagatgcagctggtgcagtctggggctgaggtgaagaagcctggggcctcagtgaaggtctcctgcaaggcttccggatacaccctcactgaattatccatgcactgggtgcgacaggctcctggaaaagggcttgagtggatgggaggttttgatcctgaagatggtgaaacaatctacgcacagaagttccagggcagagtcaccatgaccgaggacacatctacagacacagcctacatggagctgagcagcctgagatctgaggacactgccgtgtattactgtgcgcgcatgtcttctatgtactacgattggggtcaaggtactctggtgaccgtctcctca

SEQ ID NO: 648 - protein, 250 aa, synthetic construct
  REGION 1..250: note = Description of Artificial Sequence: Synthetic polypeptide
QSVVTQPPSVSGAPGQRVTISCTGSSSNIGAGYDVNWYQQFPGTAPKLLIYGNSNRPSGVPDRFSGSKSGTSASLAITGLQAEDEADYYCQSYDSSLSGSYVFGTGTKVTVLGSRGGGGSGGGGSGGGGSLEMAQMQLVQSGAEVKKPGASVKVSCKASGYTLTELSMHWVRQAPGKGLEWMGGFDPEDGETIYAQKFQGRVTMTEDTSTDTAYMELSSLRSEDTAVYYCARMSSMYYDWGQGTLVTVSS

SEQ ID NO: 649 - DNA, 732 bp, synthetic construct
  misc_feature 1..732: note = Description of Artificial Sequence: Synthetic polynucleotide
  source 1..732: mol_type = other DNA
tcctatgtgctgactcagccaccctcagtgtcagtggccccaggaaagacggccaggattacctgtgggggaaacaacattggaagtaaaagtgtgcactggtaccagcagaagccaggccaggcccctgtgctggtcatctattatgatagcgaccggccctcagggatccctgagcgattctctggctccaactctgggaacacggccaccctgaccatcagcagggtcgaagccggggatgaggccgactattactgtcaggtgtgggatagtagtagtgattatgtcttcggaactgggaccaaggtcaccgtcctaggttctagaggtggtggtggtagcggcggcggcggctctggtggtggtggatccctcgagatggccgaggtgcagctggtggagactgggggaggcttggtcaagcctggagggtccctgagactctcctgtgcagcctctggattcaccgtcagtgactactacatgagctggatccgccaggctccagggaagggcctggagtggatttcatacattagtggtagtggtaatagcatatactacgcagactctgtgaagggccgattcaccatctccagggacaacgccaagaactcactggatctgcaaatgaccagcctgagagccgaggacacggccgtatattactgtgcgcgctctactaaattcgattactggggtcaaggtactctggtgaccgtctcctca

SEQ ID NO: 650 - protein, 244 aa, synthetic construct
  REGION 1..244: note = Description of Artificial Sequence: Synthetic polypeptide
SYVLTQPPSVSVAPGKTARITCGGNNIGSKSVHWYQQKPGQAPVLVIYYDSDRPSGIPERFSGSNSGNTATLTISRVEAGDEADYYCQVWDSSSDYVFGTGTKVTVLGSRGGGGSGGGGSGGGGSLEMAEVQLVETGGGLVKPGGSLRLSCAASGFTVSDYYMSWIRQAPGKGLEWISYISGSGNSIYYADSVKGRFTISRDNAKNSLDLQMTSLRAEDTAVYYCARSTKFDYWGQGTLVTVSS

SEQ ID NO: 651 - DNA, 753 bp, synthetic construct
  misc_feature 1..753: note = Description of Artificial Sequence: Synthetic polynucleotide
  source 1..753: mol_type = other DNA
ctgcctgtgctgactcagccaccctcagcgtctgggacccccgggcagagggtcaccatctcttgttctggaagcagctccaacgtcggaagttacactgtaaactggtaccggcaactcccaggaacggcccccacactcctcatctataataataatcagcggccctcaggggtccctgaccgattctctgactccaagtctggcacctcggcctccctgaccattagtgggctccagcctgaggatgaggctgattattattgtgcagcatgggatgacaggctgggtggttatgtcttcggaactgggaccaaggtcaccgtcctaggttctagaggtggtggtggtagcggcggcggcggctctggtggtggtggatccctcgagatggccgaggtgcagctggtgcagtctggagcagaggtgaaaaagccgggggagtctctgaagatctcctgtaagggttctggatacagctttaccaactactggatcggctgggtgcgccagatgcccgggaaaggcctggagtggatggggatcatctatcctggtgactctgataccagatacagcccgtccttccaaggccaggtcaccatctcagccgacaagtccatcagcaccgcctacctacagtggagcagcctgaaggcctcggacaccgccatgtattactgtgcgcgctctactggttcttctcatatgtctgatgaatggggtcaaggtactctggtgaccgtctcctca

SEQ ID NO: 652 - protein, 251 aa, synthetic construct
  REGION 1..251: note = Description of Artificial Sequence: Synthetic polypeptide
LPVLTQPPSASGTPGQRVTISCSGSSSNVGSYTVNWYRQLPGTAPTLLIYNNNQRPSGVPDRFSDSKSGTSASLTISGLQPEDEADYYCAAWDDRLGGYVFGTGTKVTVLGSRGGGGSGGGGSGGGGSLEMAEVQLVQSGAEVKKPGESLKISCKGSGYSFTNYWIGWVRQMPGKGLEWMGIIYPGDSDTRYSPSFQGQVTISADKSISTAYLQWSSLKASDTAMYYCARSTGSSHMSDEWGQGTLVTVSS

SEQ ID NO: 653 - DNA, 744 bp, synthetic construct
  misc_feature 1..744: note = Description of Artificial Sequence: Synthetic polynucleotide
  source 1..744: mol_type = other DNA
aattttatgctgactcagccccactctgtgtcggagtctccggggaagacggtaaccatctcctgcaccggcagcagtggcagcattgccagcaactatgtgcagtggtaccagcagcgcccgggcagtgcccccaccactgtgatctatgaggataaccaaagaccctctggggtccctgatcggttctctggctccatcgacagctcctccaactctgcctccctcaccatctctggactgaagactgaggacgaggctgactactactgtcagtcttatgatagcagcaatcattgggtgttcggcggagggaccaagctgaccgtcctaggttctagaggtggtggtggtagcggcggcggcggctctggtggtggtggatccctcgagatggcccaagtgcagctacagcagtggggcgcaggactgttgaagccttcggagaccctgtccctcacctgcgctgtctatggtgggtccttcagtggttactactggagctggatccgccagcccccagggaaggggctggagtggattggggagatcactcatagtggaaggtccaactacaacccgtccctcaagagtcgagtcaccatatcagtagacacgtccaagaaccagttctccctgaagctgagctctgtgaccgccgcggacacggccgtgtattactgtgcgcgctcttctatcatgtctgattactggggtcaaggtactctggtgaccgtctcctca

SEQ ID NO: 654 - protein, 248 aa, synthetic construct
  REGION 1..248: note = Description of Artificial Sequence: Synthetic polypeptide
NFMLTQPHSVSESPGKTVTISCTGSSGSIASNYVQWYQQRPGSAPTTVIYEDNQRPSGVPDRFSGSIDSSSNSASLTISGLKTEDEADYYCQSYDSSNHWVFGGGTKLTVLGSRGGGGSGGGGSGGGGSLEMAQVQLQQWGAGLLKPSETLSLTCAVYGGSFSGYYWSWIRQPPGKGLEWIGEITHSGRSNYNPSLKSRVTISVDTSKNQFSLKLSSVTAADTAVYYCARSSIMSDYWGQGTLVTVSS

SEQ ID NO: 655 - DNA, 753 bp, synthetic construct
  misc_feature 1..753: note = Description of Artificial Sequence: Synthetic polynucleotide
  source 1..753: mol_type = other DNA
cagtctgtgttgacgcagccgccctcagtgtctggggccccagggcagagggtcaccatctcctgcactgggagcacctccaacatcggggcaggttatgatgtacactggtaccagcagcttccaggaacagcccccaaactcctcatcaacaataacaggaatcggccctcaggggtccctgaccgattctctggctccaagtctggcacgtcagccaccctgggcatcaccggactccagactggggacgaggccgattattactgcggaacatgggatggcagcctgactggtgcagtgttcggcggagggaccaagctgaccgtcctaggttctagaggtggtggtggtagcggcggcggcggctctggtggtggtggatccctcgagatggccgaggtccagctggtgcagtctggggctgaggtgaagaagcctgggtcctcggtgaaggtctcatgcaaggcttctggaggcaccttcagcagctatgctatcagctgggtgcgacaggcccctggacaagggcttgagtggatgggagggatcatccctatctttggtacagcaaactacgcacagaagttccagggcagagtcacgattaccgcggacgaatccacgagcacagcctacatggagctgagcagcctgagatctgaggacacggccgtgtattactgtgcgcgcggttctgctctggaccattacgatcgttggggtcaaggtactctggtgaccgtctcctca

SEQ ID NO: 656 - protein, 251 aa, synthetic construct
  REGION 1..251: note = Description of Artificial Sequence: Synthetic polypeptide
QSVLTQPPSVSGAPGQRVTISCTGSTSNIGAGYDVHWYQQLPGTAPKLLINNNRNRPSGVPDRFSGSKSGTSATLGITGLQTGDEADYYCGTWDGSLTGAVFGGGTKLTVLGSRGGGGSGGGGSGGGGSLEMAEVQLVQSGAEVKKPGSSVKVSCKASGGTFSSYAISWVRQAPGQGLEWMGGIIPIFGTANYAQKFQGRVTITADESTSTAYMELSSLRSEDTAVYYCARGSALDHYDRWGQGTLVTVSS

SEQ ID NO: 657 - DNA, 747 bp, synthetic construct
  misc_feature 1..747: note = Description of Artificial Sequence: Synthetic polynucleotide
  source 1..747: mol_type = other DNA
aattttatgctgactcagccccactctgtgtcggagtctccggggaagacggtaaccatctcctgcacccgcagcagtggcagcattgccagcaactatgtgcagtggtaccagcagcgcccgggcagtgcccccaccactgtgatctatgaggataaccaaagaccctctggggtccctgatcggttctctggctccatcgacagctcctccaactctgcctccctcaccatctctggactgaagactgaggacgaggctgactactactgtcagtcttatgatagcaccaattgggtgttcggcggagggaccaagctgaccgtcctaggttctagaggtggtggtggtagcggcggcggcggctctggtggtggtggatccctcgagatggcccaggtgcagctggtgcagtctggggctgaggtgaagaagcctgggtcctcggtgaaggtctcctgcaaggcttctggaggcaccttcagcagctatgctatcagctgggtgcgacaggcccctggacaagggcttgagtggatgggagggatcatccctatctttggtacagcaaactacgcacagaagttccagggcagagtcacgattaccgcggacgaatccacgagcacagcctacatggagctgagcagcctgagatctgaggacactgccgtgtattactgtgcgcgctacaactactacttcaacgattactggggtcaaggtactctggtgaccgtctcctca

SEQ ID NO: 658 - protein, 249 aa, synthetic construct
  REGION 1..249: note = Description of Artificial Sequence: Synthetic polypeptide
NFMLTQPHSVSESPGKTVTISCTRSSGSIASNYVQWYQQRPGSAPTTVIYEDNQRPSGVPDRFSGSIDSSSNSASLTISGLKTEDEADYYCQSYDSTNWVFGGGTKLTVLGSRGGGGSGGGGSGGGGSLEMAQVQLVQSGAEVKKPGSSVKVSCKASGGTFSSYAISWVRQAPGQGLEWMGGIIPIFGTANYAQKFQGRVTITADESTSTAYMELSSLRSEDTAVYYCARYNYYFNDYWGQGTLVTVSS

SEQ ID NO: 659 - DNA, 744 bp, synthetic construct
  misc_feature 1..744: note = Description of Artificial Sequence: Synthetic polynucleotide
  source 1..744: mol_type = other DNA
tcctatgtgctgactcagccaccctcagtgtcagtggccccaggaaagacggccaggattacctgtgggggaaacaacattggaagtaaaagtgtgcactggtaccagcagaagccaggccaggcccctgtgctggtcatctattatgatagcgaccggccctcagggatccctgagcgattctctggctccaactctgggaacacggccaccctgaccatcagcagggtcgaagccggggatgaggccgactattactgtcaggtgtgggatagtagtagtgatcatccttatgtcttcggaactgggaccaaggtcaccgtcctaggttctagaggtggtggtggtagcggcggcggcggctctggtggtggtggatccctcgagatggcccagatgcagctggtgcagtctggagctgaggtgaagaagcctggggcctcagtgaaggtctcctgcaaggcttctggttacacctttaccagctatggtatcagctgggtgcgacaggcccctggacaagggcttgagtggatgggatggatcagcgcttacaatggtaacacaaactatgcacagaagctccagggcagagtcaccatgaccacagacacatccacgagcacagcctacatggagctgaggagcctgagatctgacgacactgccgtgtattactgtgcgcgctctatgttcggtgctcatgattcttggggtcaaggtactctggtgaccgtctcctca

SEQ ID NO: 660 - protein, 248 aa, synthetic construct
  REGION 1..248: note = Description of Artificial Sequence: Synthetic polypeptide
SYVLTQPPSVSVAPGKTARITCGGNNIGSKSVHWYQQKPGQAPVLVIYYDSDRPSGIPERFSGSNSGNTATLTISRVEAGDEADYYCQVWDSSSDHPYVFGTGTKVTVLGSRGGGGSGGGGSGGGGSLEMAQMQLVQSGAEVKKPGASVKVSCKASGYTFTSYGISWVRQAPGQGLEWMGWISAYNGNTNYAQKLQGRVTMTTDTSTSTAYMELRSLRSDDTAVYYCARSMFGAHDSWGQGTLVTVSS

SEQ ID NO: 661 - DNA, 753 bp, synthetic construct
  misc_feature 1..753: note = Description of Artificial Sequence: Synthetic polynucleotide
  source 1..753: mol_type = other DNA
cagtctgtgttgacgcagccgccctcagtgtctggggccccagggcagagggtcaccatctcctgcactgggagcagctccaacatcggggcaggttttgatgtacactggtaccagctacttccaggaacagcccccaaactcctcatctatgctaacagcaatcggccctcaggggtccctgaccgattctctggctccaagtctggcacctcagcctccctggccatcactgggctcctggctgaggatgaggctgattattactgccagtcctatgacagcagcctgagtggtgtggtattcggcggagggaccaagctgaccgtcctaggttctagaggtggtggtggtagcggcggcggcggctctggtggtggtggatccctcgagatggcccaggtgcagctggtgcaatctggggctgaggtgaagaagcctgggtcctcggtgaaggtctcctgcaaggcttctggaggcaccttcagcagctatgctatcagctgggtgcgacaggcccctggacaagggcttgagtggatgggagggatcatccctatctttggtacagcaaactacgcacagaagttccagggcagagtcacgattaccgcggacgaatccacgagcacagcctacatggagctgagcagcctgagatctgaggacactgccgtgtattactgtgcgcgcggtgcttctttcgaccgtcatgataactggggtcaaggtactctggtgaccgtctcctca

SEQ ID NO: 662 - protein, 251 aa, synthetic construct
  REGION 1..251: note = Description of Artificial Sequence: Synthetic polypeptide
QSVLTQPPSVSGAPGQRVTISCTGSSSNIGAGFDVHWYQLLPGTAPKLLIYANSNRPSGVPDRFSGSKSGTSASLAITGLLAEDEADYYCQSYDSSLSGVVFGGGTKLTVLGSRGGGGSGGGGSGGGGSLEMAQVQLVQSGAEVKKPGSSVKVSCKASGGTFSSYAISWVRQAPGQGLEWMGGIIPIFGTANYAQKFQGRVTITADESTSTAYMELSSLRSEDTAVYYCARGASFDRHDNWGQGTLVTVSS

SEQ ID NO: 663 - DNA, 747 bp, synthetic construct
  misc_feature 1..747: note = Description of Artificial Sequence: Synthetic polynucleotide
  source 1..747: mol_type = other DNA
aattttatgctgactcagccccactctgtgtcggagtctccggggaagacggtaaccatctcctgcacccgcagcagtggcagcattgccagcaactatgtgcagtggtaccagcagcgcccgggcagttcccccaccactgtgatctatgaggataaccaaagaccctctggggtccctgatcggttctctggctccatcgacagctcctccaactctgcctccctcaccatctctggactgaagactgaggacgaggctgactactactgtcagtcttatgatagcagcaattgggtgttcggcggagggaccaagctgaccgtcctaggttctagaggtggtggtggtagcggcggcggcggctctggtggtggtggatccctcgagatggccgaggtccagctggtgcagtctggggctgaggtgaagaagcctgggtcctcggtgaaggtctcctgcaaggcttctggaggcaccttcagcagctatgctatcagctgggtgcgacaggcccctggacaagggcttgagtggatgggagggatcatccctatctttggtacagcaaactacgcacagaagttccagggcagagtcacgattaccgcggacgaatccacgagcacagcctacatggagctgagcagcctgagatctgaggacacggccgtgtattactgtgcgcgctctaactactactacaacgattactggggtcaaggtactctggtgaccgtctcctca

SEQ ID NO: 664 - protein, 249 aa, synthetic construct
  REGION 1..249: note = Description of Artificial Sequence: Synthetic polypeptide
NFMLTQPHSVSESPGKTVTISCTRSSGSIASNYVQWYQQRPGSSPTTVIYEDNQRPSGVPDRFSGSIDSSSNSASLTISGLKTEDEADYYCQSYDSSNWVFGGGTKLTVLGSRGGGGSGGGGSGGGGSLEMAEVQLVQSGAEVKKPGSSVKVSCKASGGTFSSYAISWVRQAPGQGLEWMGGIIPIFGTANYAQKFQGRVTITADESTSTAYMELSSLRSEDTAVYYCARSNYYYNDYWGQGTLVTVSS

SEQ ID NO: 665 - DNA, 747 bp, synthetic construct
  misc_feature 1..747: note = Description of Artificial Sequence: Synthetic polynucleotide
  source 1..747: mol_type = other DNA
cagtctgtgttgacgcagccgccctcagtgtctggggccccagggcagagggtcaccatctcctgcactgggagcagctccaacatcggggcaggttatgatgtacactggtaccagcagcttccaggaacagcccccaaactcctcatctatggtaacagcaatcggccctcaggggtccctgaccgattctctggctccaagtctggcacctcagcctccctggccatcactgggctccaggctgaggatgaggctgattattactgccagtcctatgacagcagcctgagtggttatgtcttcggaactgggaccaaggtcaccgtcctaggttctagaggtggtggtggtagcggcggcggcggctctggtggtggtggatccctcgagatggcccaggtgcagctggtgcagtctggggctgaggtgaagaagcctggggcctcagtgaaggtctcctgcaaggtttccggatacaccctcactgaattatccatgcactgggtgcgacaggctcctggaaaagggcttgagtggatgggaggttttgatcctgaagatggtgaaacaatctacgcacagaagttccagggcagagtcaccatgaccgaggacacatctacagacacagcctacatggagctgagcagcctgagatctgaggacactgccgtgtattactgtgcgcgctactctggtgtttactacgattggggtcaaggtactctggtgaccgtctcctca

SEQ ID NO: 666 - protein, 249 aa, synthetic construct
  REGION 1..249: note = Description of Artificial Sequence: Synthetic polypeptide
QSVLTQPPSVSGAPGQRVTISCTGSSSNIGAGYDVHWYQQLPGTAPKLLIYGNSNRPSGVPDRFSGSKSGTSASLAITGLQAEDEADYYCQSYDSSLSGYVFGTGTKVTVLGSRGGGGSGGGGSGGGGSLEMAQVQLVQSGAEVKKPGASVKVSCKVSGYTLTELSMHWVRQAPGKGLEWMGGFDPEDGETIYAQKFQGRVTMTEDTSTDTAYMELSSLRSEDTAVYYCARYSGVYYDWGQGTLVTVSS

SEQ ID NO: 667 - DNA, 747 bp, synthetic construct
  misc_feature 1..747: note = Description of Artificial Sequence: Synthetic polynucleotide
  source 1..747: mol_type = other DNA
aattttatgctgactcagccccactctgtgtcggggtctccggggaagacggtaaccatctcctgcaccggcagcagtggcagcattgccgacaactttgtgcagtggtaccagcagcgcccgggcggtgtccccaccactgtgatctttaatgatgacgaaagaccctctggcgtccctgatcggttctctggctccatcgacacctcctccaattctgcctccctcaccatctctggactgaagactgaggacgaggctgactactactgtcagtcttatgataataataatcgaggggtgttcggcggagggaccaagctgaccgtcctaggttctagaggtggtggtggtagcggcggcggcggctctggtggtggtggatccctcgagatggcccaggtccagctggtgcagtctggggctgaggtgaagaagcctgggtcctcggtgaaggtctcctgcaaggcttctggaggcaccttcagcagctatgctatcagctgggtgcgacaggcccctggacaagggcttgagtggatgggatggatgaaccctaacagtggtaacacaggctatgcacagaagttccagggcagagtcaccatgaccaggaacacctccataagcacagcctacatggagctgagcaacctgagatctgaggacacggccgtgtattactgtgcgcgctactactcttacggttacgattggggtcaaggtactctggtgaccgtctcctca

SEQ ID NO: 668 - protein, 249 aa, synthetic construct
  REGION 1..249: note = Description of Artificial Sequence: Synthetic polypeptide
NFMLTQPHSVSGSPGKTVTISCTGSSGSIADNFVQWYQQRPGGVPTTVIFNDDERPSGVPDRFSGSIDTSSNSASLTISGLKTEDEADYYCQSYDNNNRGVFGGGTKLTVLGSRGGGGSGGGGSGGGGSLEMAQVQLVQSGAEVKKPGSSVKVSCKASGGTFSSYAISWVRQAPGQGLEWMGWMNPNSGNTGYAQKFQGRVTMTRNTSISTAYMELSNLRSEDTAVYYCARYYSYGYDWGQGTLVTVSS

SEQ ID NO: 669 - DNA, 765 bp, synthetic construct
  misc_feature 1..765: note = Description of Artificial Sequence: Synthetic polynucleotide
  source 1..765: mol_type = other DNA
cagtctgtcgtgacgcagccgccctcagtgtctggggccccagggcagacggtcaccatctcctgcactgggggcagctccaacatcgggacaggttattttgtaaattggtaccagcaggttccaggaaaagcccccaaactcctcatcctgggtaacaataatcggccctcgggggtccctgaccgactctccggctccacgtccggcacctcagcctccctggccatcactgggctccaggctgaggatgagggtacttattactgccagtcctatgacagcagcctgagtggttatgtcttcggaactgggaccaaggtcaccgtcctaggttctagaggtggtggtggtagcggcggcggcggctctggtggtggtggatccctcgagatggcccaggtacagctgcagcagtcaggtccaggactggtgaagccctcgcagaccctctcactcacctgtggcatctccggggacagtgtctctaccaacagtgttgcttggcactggatcaggcagtccccatcgagaggccttgagtggctgggaaggacatactacaggtccaagtggtctaatgactatggagtatctgtgaaaagtcgaatcaccatcatcccagacacatccaagaaccagttctccctgcagctgaactctgtgactcccgaggacacggctgtgtattactgtgcgcgctcttcttcttggtaccagatcttcgattactggggtcaaggtactctggtgaccgtctcctca

SEQ ID NO: 670 - protein, 255 aa, synthetic construct
  REGION 1..255: note = Description of Artificial Sequence: Synthetic polypeptide
QSVVTQPPSVSGAPGQTVTISCTGGSSNIGTGYFVNWYQQVPGKAPKLLILGNNNRPSGVPDRLSGSTSGTSASLAITGLQAEDEGTYYCQSYDSSLSGYVFGTGTKVTVLGSRGGGGSGGGGSGGGGSLEMAQVQLQQSGPGLVKPSQTLSLTCGISGDSVSTNSVAWHWIRQSPSRGLEWLGRTYYRSKWSNDYGVSVKSRITIIPDTSKNQFSLQLNSVTPEDTAVYYCARSSSWYQIFDYWGQGTLVTVSS

SEQ ID NO: 671 - DNA, 762 bp, synthetic construct
  misc_feature 1..762: note = Description of Artificial Sequence: Synthetic polynucleotide
  source 1..762: mol_type = other DNA
aattttatgctgactcagccccactctgtgtcggagtctccggggaagacggtaaccatctcctgcaccggcagcagcgacagcatagccaacaactatgttcagtggtaccagcagcgcccgggcagtgcccccaccaatgtgatctacgaagatgtccaaagaccctctggggtccctgatcggttctctgggtccatcgacagctcctccaactctgcctccctcaccatctctggactgaagactgaggacgaggctgtctactattgtcagtcttatcatagcgacaatcgttgggtgttcggcggcgggaccaagctgaccgtcctaggttctagaggtggtggtggtagcggcggcggcggctctggtggtggtggatccctcgagatggcccaggtgcagctggtggagtctgggggaggcttggtacagcctggggggtccctgagactctcctgtgcagcctctggattcacctttagcagctatgccatgagctgggtccgccaggctccagggaaggggctggagtgggtctcagctattagtggtagtggtggtagcacatactacgcagactccgtgaagggccggttcaccatctccagagacaattccaagaacacgctgtatctgcaaatgaacagcctgagagccgaggacacggccgtatattactgtgcgcgctctggtgcttactgggactactctgtttacgatgaatggggtcaaggtactctggtgaccgtctcctca

SEQ ID NO: 672 - protein, 254 aa, synthetic construct
  REGION 1..254: note = Description of Artificial Sequence: Synthetic polypeptide
NFMLTQPHSVSESPGKTVTISCTGSSDSIANNYVQWYQQRPGSAPTNVIYEDVQRPSGVPDRFSGSIDSSSNSASLTISGLKTEDEAVYYCQSYHSDNRWVFGGGTKLTVLGSRGGGGSGGGGSGGGGSLEMAQVQLVESGGGLVQPGGSLRLSCAASGFTFSSYAMSWVRQAPGKGLEWVSAISGSGGSTYYADSVKGRFTISRDNSKNTLYLQMNSLRAEDTAVYYCARSGAYWDYSVYDEWGQGTLVTVSS

SEQ ID NO: 673 - DNA, 744 bp, synthetic construct
  misc_feature 1..744: note = Description of Artificial Sequence: Synthetic polynucleotide
  source 1..744: mol_type = other DNA
cagtctgtgttgactcagccaccctcagtgtccgtgtccccaggacagacagccaccatcgcctgttctggacataaattgggggataaatatgcttcctggtatcagcagaagtcgggccagtcccctgtgttgatcatctatcaggataataagcggccctcagggattcctgagcgattctctggctccaactctgggaacacagccactctgaccatcagcgggacccaggctctggatgaggctgactattattgtcaggcgtgggacagtagtacttatgtggcattcggcggagggaccaagctgaccgtcctaggttctagaggtggtggtggtagcggcggcggcggctctggtggtggtggatccctcgagatggcccaggtgcagctgcaggagtccggcccaggactggtgaagccttcggagaccctgtccctcacctgcgttgtctctggtggctccatcagcagtagtaactggtggagctgggtccgccagcccccagggaaggggctggagtggattggggaaatctatcatagtgggagccccaactacaacccatccctcaagagtcgagtcaccatatcagtagacaagtccaagaaccagttctccctgaagctgagctctgtgaccgccgcggacacggccgtgtattactgtgcgcgcatgactactcatactttcggttacgatgcttggggtcaaggtactctggtgaccgtctcctca

SEQ ID NO: 674 - protein, 248 aa, synthetic construct
  REGION 1..248: note = Description of Artificial Sequence: Synthetic polypeptide
QSVLTQPPSVSVSPGQTATIACSGHKLGDKYASWYQQKSGQSPVLIIYQDNKRPSGIPERFSGSNSGNTATLTISGTQALDEADYYCQAWDSSTYVAFGGGTKLTVLGSRGGGGSGGGGSGGGGSLEMAQVQLQESGPGLVKPSETLSLTCVVSGGSISSSNWWSWVRQPPGKGLEWIGEIYHSGSPNYNPSLKSRVTISVDKSKNQFSLKLSSVTAADTAVYYCARMTTHTFGYDAWGQGTLVTVSS

SEQ ID NO: 675 - DNA, 735 bp, synthetic construct
  misc_feature 1..735: note = Description of Artificial Sequence: Synthetic polynucleotide
  source 1..735: mol_type = other DNA
cagcctgtgctgactcagccaccctcagtgtcagtggccccaggaaagacggccacgattacttgtgggggaaacaacattggaagtgaaagtgtgcactggtaccaccagaagccaggccaggcccctgtgttggtcatctatgatgatgccggccggccctcagggatccctgagcgattcactggctccaactctgggaacacggccaccctgaccatcagcagggtcgaagccggggatgaggccgactattactgtcaggtgtgggacagaaatagtgctcagtttgtcttcggacctgggaccaaggtcaccgtcctaggttctagaggtggtggtggtagcggcggcggcggctctggtggtggtggatccctcgagatggccgaggtccagctggtgcagtctggagctgaggtgaagaagcctggggcctcagtgaaggtctcctgcaaggcttctggttacacctttaccagctatggtatcagctgggtgcgacaggcccctggacaagggcttgagtggatgggatggatcagcgcttacaatggtaacacaaactatgcacagaagctccagggcagagtcaccatgaccacagacacatccacgagcacagcctacatggagctgaggagcctgagatctgacgacacggccgtgtattactgtgcgcgcggtgttcatctggattggtggggtcaaggtactctggtgaccgtctcctca

SEQ ID NO: 676 - protein, 245 aa, synthetic construct
  REGION 1..245: note = Description of Artificial Sequence: Synthetic polypeptide
QPVLTQPPSVSVAPGKTATITCGGNNIGSESVHWYHQKPGQAPVLVIYDDAGRPSGIPERFTGSNSGNTATLTISRVEAGDEADYYCQVWDRNSAQFVFGPGTKVTVLGSRGGGGSGGGGSGGGGSLEMAEVQLVQSGAEVKKPGASVKVSCKASGYTFTSYGISWVRQAPGQGLEWMGWISAYNGNTNYAQKLQGRVTMTTDTSTSTAYMELRSLRSDDTAVYYCARGVHLDWWGQGTLVTVSS

SEQ ID NO: 677 - DNA, 771 bp, synthetic construct
  misc_feature 1..771: note = Description of Artificial Sequence: Synthetic polynucleotide
  source 1..771: mol_type = other DNA
cagtctgtcgtgacgcagccaccctcagcgtctgggacccccgggcagagggtcaccatctcttgttctggaagcagctccaacatcggaagtaattatgtatactggtaccagcagctcccaggaacggcccccaaactcctcatctatagtaataatcagcggccctcaggggtccctgaccgattctctggctccaagtctggcacctcagcctccctggccatcagtgggctccggtccgaggatgaggctgattattactgtgcagcatgggatgacagcctgagtggttatgtcttcggaactgggaccaagctgaccgtcctaggttctagaggtggtggtggtagcggcggcggcggctctggtggtggtggatccctcgagatggcccaggtgcagctacagcagtggggcgcaggactgttgaagccttcggagaccctgtccctcacctgcgctgtctatggtgggtccttcagtggttactactggagctggatccgccagcccccagggaaggggctggagtggattggggaaatcaatcatagtggaagcaccaactacaacccgtccctcaagagtcgagtcaccatatcagtagacacgtccaagaaccagttctccctgaagctgagctctgtgaccgccgcggacacggccgtgtattactgtgcgcgcctgtacgaaggtggttaccatggttggggttcttggctgtcttctgattcttggggtcaaggtactctggtgaccgtctcctca

SEQ ID NO: 678 - protein, 257 aa, synthetic construct
  REGION 1..257: note = Description of Artificial Sequence: Synthetic polypeptide
QSVVTQPPSASGTPGQRVTISCSGSSSNIGSNYVYWYQQLPGTAPKLLIYSNNQRPSGVPDRFSGSKSGTSASLAISGLRSEDEADYYCAAWDDSLSGYVFGTGTKLTVLGSRGGGGSGGGGSGGGGSLEMAQVQLQQWGAGLLKPSETLSLTCAVYGGSFSGYYWSWIRQPPGKGLEWIGEINHSGSTNYNPSLKSRVTISVDTSKNQFSLKLSSVTAADTAVYYCARLYEGGYHGWGSWLSSDSWGQGTLVTVSS

SEQ ID NO: 679 - DNA, 750 bp, synthetic construct
  misc_feature 1..750: note = Description of Artificial Sequence: Synthetic polynucleotide
  source 1..750: mol_type = other DNA
cagtctgtgttgactcagccaccctcagcgtctgggacccccgggcagagggtcaccatctcttgttctggaagcagctccaacatcggaagtaatactgtaaactggtaccagcagctcccaggaacggcccccaaactcctcatctatagtaataatcagcggccctcaggggtccctgaccgattctctggctccaagtctggcacctcagcctccctggccatcagtgggctccagtctgaggatgaggctgattattactgtgcagcatgggatgacagcctgaatggttattgggtgttcggcggagggaccaagctgaccgtcctaggttctagaggtggtggtggtagcggcggcggcggctctggtggtggtggatccctcgagatggcccaggtgcagctacagcagtggggcgcaggactgttgaagccttcggagaccctgtccctcacctgcgctgtctatggtgggtccttcagtggttactactggagctggatccgccagcccccagggaaggggctggagtggattggggaaatcaatcatagtggaagcaccaactacaacccgtccctcaagagtcgagtcaccatatcagtagacacgtccaagaaccagttctccctgaagctgagctctgtgaccgccgcggacacggctgtgtattactgtgcgcgcgaaggggcatttgatgcttttgatatctggggccaagggacaatggtcaccgtctcttca

SEQ ID NO: 680 - protein, 250 aa, synthetic construct
  REGION 1..250: note = Description of Artificial Sequence: Synthetic polypeptide
QSVLTQPPSASGTPGQRVTISCSGSSSNIGSNTVNWYQQLPGTAPKLLIYSNNQRPSGVPDRFSGSKSGTSASLAISGLQSEDEADYYCAAWDDSLNGYWVFGGGTKLTVLGSRGGGGSGGGGSGGGGSLEMAQVQLQQWGAGLLKPSETLSLTCAVYGGSFSGYYWSWIRQPPGKGLEWIGEINHSGSTNYNPSLKSRVTISVDTSKNQFSLKLSSVTAADTAVYYCAREGAFDAFDIWGQGTMVTVSS

SEQ ID NO: 681 - DNA, 756 bp, synthetic construct
  misc_feature 1..756: note = Description of Artificial Sequence: Synthetic polynucleotide
  source 1..756: mol_type = other DNA
tcctatgagctgactcagccaccctcagcgtctgggacccccgggcagagggtcaccatctcttgttctggaagcagctccaacatcggaagtaattatgtatactggtaccagcagctcccaggaacggcccccaaactcttcatctataggaataatcagcggccctcaggggtccctgaccgattctctggctccaagtctggcacctcagcctccctggccatcagtgggctccggtccgaggatgaggctgattattactgtgcagcatgggatgacagcctgagtggttatctcttcggaactgggaccaaggtcaccgtcctaggttctagaggtggtggtggtagcggcggcggcggctctggtggtggtggatccctcgagatggccgaggtgcagctggtggagtctgggggaggcttggtacagcctggcaggtccctgagactctcctgtgcagcctctggattcacctttgatgattatgccatgcactgggtccggcaagctccagggaagggcctggagtgggtctcaggtattagttggaatagtggtagcataggctatgcggactctgtgaagggccgattcaccatctccagagacaacgccaagaactccctgtatctgcaaatgaacagtctgagagctgaggacacggccttgtattactgtgcaaatggcgactccaactactactacggtatggacgtctggggccaagggaccacggtcaccgtctcctca

SEQ ID NO: 682 - protein, 252 aa, synthetic construct
  REGION 1..252: note = Description of Artificial Sequence: Synthetic polypeptide
SYELTQPPSASGTPGQRVTISCSGSSSNIGSNYVYWYQQLPGTAPKLFIYRNNQRPSGVPDRFSGSKSGTSASLAISGLRSEDEADYYCAAWDDSLSGYLFGTGTKVTVLGSRGGGGSGGGGSGGGGSLEMAEVQLVESGGGLVQPGRSLRLSCAASGFTFDDYAMHWVRQAPGKGLEWVSGISWNSGSIGYADSVKGRFTISRDNAKNSLYLQMNSLRAEDTALYYCANGDSNYYYGMDVWGQGTTVTVSS

SEQ ID NO: 683 - DNA, 768 bp, synthetic construct
  misc_feature 1..768: note = Description of Artificial Sequence: Synthetic polynucleotide
  source 1..768: mol_type = other DNA
cagtctgccctgactcagcctgcctccgtgtccgggtctcctggacagtcgatcaccatctcctgcactggaaccagcagtgacattggtggttataactatgtctcctggtaccaacaacacccaggcaaagcccccaaactcatgatttatgatgtcagtaatcggccctcaggggtttctaatcgcttctctggctccaagtctggcaacacggcctccctgaccatctctgggctccaggctgaggacgaggctgattattactgcatctcatatacacgcacctggaacccctatgtcttcgggagtgggaccaaggtcaccgtcctaggttctagaggtggtggtggtagcggcggcggcggctctggtggtggtggatccctcgagatggccgaggtgcagctggtgcagtctgggggaggcgtggtacagcctggggggtccctgagactctcctgtgcagcctctggattcacctttgatgattatgccatgcactgggtccgtcaagctccagggaagggtctggagtgggtctctcttattagtggggatggtggtagcacatactatgcagactctgtgaagggccgattcaccatctccagagacaacagcaaaaactccctgtatctgcaaatgaacagtctgagaactgaggacaccgccttgtattactgtgcaaaagatcgggcagcagctggctactactactacggtatggacgtctggggccaagggaccacggtcaccgtctcctca

SEQ ID NO: 684 - protein, 256 aa, synthetic construct
  REGION 1..256: note = Description of Artificial Sequence: Synthetic polypeptide
QSALTQPASVSGSPGQSITISCTGTSSDIGGYNYVSWYQQHPGKAPKLMIYDVSNRPSGVSNRFSGSKSGNTASLTISGLQAEDEADYYCISYTRTWNPYVFGSGTKVTVLGSRGGGGSGGGGSGGGGSLEMAEVQLVQSGGGVVQPGGSLRLSCAASGFTFDDYAMHWVRQAPGKGLEWVSLISGDGGSTYYADSVKGRFTISRDNSKNSLYLQMNSLRTEDTALYYCAKDRAAAGYYYYGMDVWGQGTTVTVSS

SEQ ID NO: 685 - DNA, 750 bp, synthetic construct
  misc_feature 1..750: note = Description of Artificial Sequence: Synthetic polynucleotide
  source 1..750: mol_type = other DNA
ctgcctgtgctgactcagccaccctcagtgtccgtgtccccaggacagacagccatcatcacctgctctggagataaattgggggaaaaatatgtttcctggtatcagcagaagccaggccagtcccctgtactggtcatcgatcaagataccaggaggccctcagggatccctgagcgattctctggctccaactctgggaccacagccactctgaccatcagcgggacccaggctatggatgaggctgactattactgtcaggcgtgggacaggggtgtggtattcggcggagggaccaagctgaccgtcctaggttctagaggtggtggtggtagcggcggcggcggctctggtggtggtggatccctcgagatggccgaggtgcagctggtggagtctgggggagacttggtacagcctggcaggtccctgagactctcctgtgcagcctctggattcacctttaatgattatgccatgcactgggtccggcaagctccagggaagggcctggagtgggtctcaggtattagttggagtggtaataacataggctatgcggactctgtgaagggccgattcaccatctccagagacaacgccaagaactccctgtatctgcaaatgaacagtctgagagctgaggacacggccttgtattactgtgcaaaagatagtatacggtatggcatcacctggggaggttttgactactggggccagggaaccctggtcaccgtctcctca

SEQ ID NO: 686 - protein, 250 aa, synthetic construct
  REGION 1..250: note = Description of Artificial Sequence: Synthetic polypeptide
LPVLTQPPSVSVSPGQTAIITCSGDKLGEKYVSWYQQKPGQSPVLVIDQDTRRPSGIPERFSGSNSGTTATLTISGTQAMDEADYYCQAWDRGVVFGGGTKLTVLGSRGGGGSGGGGSGGGGSLEMAEVQLVESGGDLVQPGRSLRLSCAASGFTFNDYAMHWVRQAPGKGLEWVSGISWSGNNIGYADSVKGRFTISRDNAKNSLYLQMNSLRAEDTALYYCAKDSIRYGITWGGFDYWGQGTLVTVSS

SEQ ID NO: 687 - DNA, 750 bp, synthetic construct
  misc_feature 1..750: note = Description of Artificial Sequence: Synthetic polynucleotide
  source 1..750: mol_type = other DNA
cagcctgtgctgactcagccaccctcggtgtccaagggcttgagacagaccgccacactcacctgcactgggaacagcaacaatgttggcaacctaggagtagcttggctgcagcagcaccagggccaccctcccaaactcctatcctacaggaataacaaccggccctcagggatctcagagagattatctgcatccaggtcaggaaacacagcctccctgaccattactggactccagcctgaggacgaggctgactattactgctcagcatgggacagtagcctcagtgcttgggtgttcggcggagggaccaagctgaccgtcctaggttctagaggtggtggtggtagcggcggcggcggctctggtggtggtggatccctcgagatggccgaggtgcagctggtggagtctgggggagtcgtggtacagcctggggggtccctgagactctcctgtgcagcctctggattcacctttgatgattatgccatgcactgggtccgtcaagctccggggaagggtctggagtgggtctctcttattaattgggatggtggtagcacctactatgcagactctgtgaagggtcgattcaccatctccagagacaacagcaaaaactccctgtatctgcaaatgaacagtctgagagctgaggacaccgccttgtattactgtgcaaaagggatgggcctgagggcgtttgactactggggccagggaaccctggtcaccgtctcctca

SEQ ID NO: 688 - protein, 250 aa, synthetic construct
  REGION 1..250: note = Description of Artificial Sequence: Synthetic polypeptide
QPVLTQPPSVSKGLRQTATLTCTGNSNNVGNLGVAWLQQHQGHPPKLLSYRNNNRPSGISERLSASRSGNTASLTITGLQPEDEADYYCSAWDSSLSAWVFGGGTKLTVLGSRGGGGSGGGGSGGGGSLEMAEVQLVESGGVVVQPGGSLRLSCAASGFTFDDYAMHWVRQAPGKGLEWVSLINWDGGSTYYADSVKGRFTISRDNSKNSLYLQMNSLRAEDTALYYCAKGMGLRAFDYWGQGTLVTVSS

SEQ ID NO: 689 - DNA, 765 bp, synthetic construct
  misc_feature 1..765: note = Description of Artificial Sequence: Synthetic polynucleotide
  source 1..765: mol_type = other DNA
cagtctgtgttgactcagccaccctcagcgtctgggacccccgggcagagggtcaccatctcctgttctggaagcagctccaacatcggaagtaatactgtaaactggtaccagcagctcccaggaacggcccccaaactcctcatctatagtaatgatcagcggccctcaggggtccctgaccgattctctggctccaagtccggcacctcagcctccctggccatcagtgggctccagtctgaggatgaggctgattattactgtgcttcatgggatgacagcctgaatggccgttatgtcttcggaactgggaccaaggtcaccgtcctaggttctagaggtggtggtggtagcggcggcggcggctctggtggtggtggatccctcgagatggcccaggtccagctggtacagtctggggctgaggtgaggaagcctggggcctcagtgaaggtttcctgcaagacttctggatacaccttcagttggtatgctatacattgggtgcgccaggcccccggacaaaggcttgagtggatgggatggatcaacgctggcaatggaaacacaaaatattcacagaaatttcagggcagagtcagtcttaccagggacacatccgcgagcacagcctacatggagctgagcagcctgagatctgatgacacggctgtgtattactgtgcgagacccgataattatggttcgggtggggatgtttttgatatctggggccaagggacaatggtcaccgtctcttca

SEQ ID NO: 690 - protein, 255 aa, synthetic construct
  REGION 1..255: note = Description of Artificial Sequence: Synthetic polypeptide
QSVLTQPPSASGTPGQRVTISCSGSSSNIGSNTVNWYQQLPGTAPKLLIYSNDQRPSGVPDRFSGSKSGTSASLAISGLQSEDEADYYCASWDDSLNGRYVFGTGTKVTVLGSRGGGGSGGGGSGGGGSLEMAQVQLVQSGAEVRKPGASVKVSCKTSGYTFSWYAIHWVRQAPGQRLEWMGWINAGNGNTKYSQKFQGRVSLTRDTSASTAYMELSSLRSDDTAVYYCARPDNYGSGGDVFDIWGQGTMVTVSS

SEQ ID NO: 691 - DNA, 744 bp, synthetic construct
  misc_feature 1..744: note = Description of Artificial Sequence: Synthetic polynucleotide
  source 1..744: mol_type = other DNA
aattttatgctgactcagccccactctgtgtcggagtctccggggaagacggtaaccatctcctgcacccgcagcagtggcagcattgccagcaactttgtgcagtggtaccagcagcgcccgggcagtgcccccacccctatgatctatgaggataacaacagaccccctggggtccctgatcggttctctgcctccgtcgacagctcctccaactctgcctccctcaccatctctggactgaagactgaggacgaggctgactactactgtcagtcttatgataccagcaatgtggtattcggcggggggaccaagctgaccgtcctaggttctagaggtggtggtggtagcggcggcggcggctctggtggtggtggatccctcgagatggccgaggtgcagctggtggagtctgggggaggcttggtacagcctggagggtccctgagactctcctgtgcagcctctggattcaccttcagtagttatgaaatgaactgggtccgccaggctccagggaaggggctggagtgggtttcatacattagtagtagtggtagtaccatatactacgcagactctgtgaagggccgattcaccatctccagagacaacgccaagaactcactgtatctgcaaatgaacagcctgagagccgaggacacggctgtttattactgtgcacgctgggactacggtatggacgtctggggccaagggaccacggtcaccgtctcctca

SEQ ID NO: 692 - protein, 248 aa, synthetic construct
  REGION 1..248: note = Description of Artificial Sequence: Synthetic polypeptide
NFMLTQPHSVSESPGKTVTISCTRSSGSIASNFVQWYQQRPGSAPTPMIYEDNNRPPGVPDRFSASVDSSSNSASLTISGLKTEDEADYYCQSYDTSNVVFGGGTKLTVLGSRGGGGSGGGGSGGGGSLEMAEVQLVESGGGLVQPGGSLRLSCAASGFTFSSYEMNWVRQAPGKGLEWVSYISSSGSTIYYADSVKGRFTISRDNAKNSLYLQMNSLRAEDTAVYYCARWDYGMDVWGQGTTVTVSS

SEQ ID NO: 693 - DNA, 762 bp, synthetic construct
  misc_feature 1..762: note = Description of Artificial Sequence: Synthetic polynucleotide
  source 1..762: mol_type = other DNA
caggctgtgctgactcagccaccctcagcgtctggggcccccgggcagagggtcaccgtctcttgttctggaagcaactccaacatcggaagtaactacgttaactggtaccagcagttcccaggaacggcccccaaactcctcatgtatagtagtagtcagcggccctcaggggtccctgaccgattctctggctccaagtctggcacctcagcctccctggccatcagtgggctccactctgaggatgaggctgattattactgtgctacatgggatgacagcctgaatgcttgggtgttcggcggagggaccaagctgaccgtcctaggttctagaggtggtggtggtagcggcggcggcggctctggtggtggtggatccctcgagatggccgaggtccagctggtgcagtctggggctgaggtgaggaagcctggggcctcagtgaaggtttcctgcaagacttctggatacaccttcacttggtatgctatacattgggtgcgccaggcccccggacaaaggcttgagtggatgggatggatcaacgctggcagtggaaacacaaaatattcacagaaatttcagggcagagtcacccttaccagggacacatccgcgagcacagcgtacatggagctgagcagcctgagatctgatgacacggctgtgtattactgtgcgagacccaataactatggttcgggtggggatgtttttgatatctggggccaagggacaatggtcaccgtctcttca

SEQ ID NO: 694 - protein, 254 aa, synthetic construct
  REGION 1..254: note = Description of Artificial Sequence: Synthetic polypeptide
QAVLTQPPSASGAPGQRVTVSCSGSNSNIGSNYVNWYQQFPGTAPKLLMYSSSQRPSGVPDRFSGSKSGTSASLAISGLHSEDEADYYCATWDDSLNAWVFGGGTKLTVLGSRGGGGSGGGGSGGGGSLEMAEVQLVQSGAEVRKPGASVKVSCKTSGYTFTWYAIHWVRQAPGQRLEWMGWINAGSGNTKYSQKFQGRVTLTRDTSASTAYMELSSLRSDDTAVYYCARPNNYGSGGDVFDIWGQGTMVTVSS

SEQ ID NO: 695 - DNA, 759 bp, synthetic construct
  misc_feature 1..759: note = Description of Artificial Sequence: Synthetic polynucleotide
  source 1..759: mol_type = other DNA
cagtctgtcgtgacgcagccgccctcagtgtctgcggccccaggacagaaggtcaccatctcctgctctggaagcagctccaacattgggaataattatgtatcctggtaccagcagctcccaggaacagcccccaaactcctcatttatgacaataataagcgaccctcagggattcctgaccgattctctggctccaagtctggcacgtcagccaccctgggcatcaccggactccagactggggacgaggccgattattactgcggaacatgggatagcagcctgagtgcttatgtcttcggaactgggaccaaggtcaccgtcctaggttctagaggtggtggtggtagcggcggcggcggctctggtggtggtggatccctcgagatggcccaggtccagctggtgcagtctggggctgaggtgaagaagcctggggcctcagtgaaagtttcctgcaaggcttctggatacaccttcacgaactatgctctgcattgggtgcgccaggcccccggacaagggcttgagtggatggcatggatcaacggtggcaatggtaacacaaaatattcacagaacttccagggcagagtcaccattaccagggacacatccgcgagcacagcctatatggagctgagcagcctgagatctgaagacacggctgtgtattactgtgcgaaaccggaggaaacagctggaacaatccactttgactactggggccagggaaccccggtcaccgtctcctca

SEQ ID NO: 696 - protein, 253 aa, synthetic construct
  REGION 1..253: note = Description of Artificial Sequence: Synthetic polypeptide
QSVVTQPPSVSAAPGQKVTISCSGSSSNIGNNYVSWYQQLPGTAPKLLIYDNNKRPSGIPDRFSGSKSGTSATLGITGLQTGDEADYYCGTWDSSLSAYVFGTGTKVTVLGSRGGGGSGGGGSGGGGSLEMAQVQLVQSGAEVKKPGASVKVSCKASGYTFTNYALHWVRQAPGQGLEWMAWINGGNGNTKYSQNFQGRVTITRDTSASTAYMELSSLRSEDTAVYYCAKPEETAGTIHFDYWGQGTPVTVSS

SEQ ID NO: 697 - DNA, 774 bp, synthetic construct
  misc_feature 1..774: note = Description of Artificial Sequence: Synthetic polynucleotide
  source 1..774: mol_type = other DNA
caggctgtgctgactcagccccactctgtgtcggagtctccggggaagacggtaaccatctcctgcacccgcagcagtggcagcattgccagcaactatgtgcagtggtaccagcagcgcccgggcagtgcccccaccactgtgatctatgaggataaccaaagaccctctggggtccctgatcggttctctggctccatcgacagctcctccaactctgcctccctcaccatctctggactgaagactgaggacgaggctgactactactgtcagtcttatgatagcaccatcacggtgttcggcggagggaccaagctgaccgtcctaggttctagaggtggtggtggtagcggcggcggcggctctggtggtggtggatccctcgagatggcccaggtccagctggtacagtctggggctgaggtgaagaagcctgggtcctcggtgaaggtctcctgcaaggcttctggaggcaccttcagcagctatgctatcagctgggtgcgacaggcccctggacaagggcttgagtggatgggagggatcatccctatctttggtacagcaaactacgcacagaagttccagggcagagtcacgattaccgcggacgaatccacgagcacagcctacatggagctgagcagcctgagatctgaggacacggccgtgtattactgtgcgggggagggttactatgatagtagtggttattccaacggtgatgcttttgatatctggggccaagggacaatggtcaccgtctcttca

SEQ ID NO: 698 - protein, 258 aa, synthetic construct
  REGION 1..258: note = Description of Artificial Sequence: Synthetic polypeptide
QAVLTQPHSVSESPGKTVTISCTRSSGSIASNYVQWYQQRPGSAPTTVIYEDNQRPSGVPDRFSGSIDSSSNSASLTISGLKTEDEADYYCQSYDSTITVFGGGTKLTVLGSRGGGGSGGGGSGGGGSLEMAQVQLVQSGAEVKKPGSSVKVSCKASGGTFSSYAISWVRQAPGQGLEWMGGIIPIFGTANYAQKFQGRVTITADESTSTAYMELSSLRSEDTAVYYCAGEGYYDSSGYSNGDAFDIWGQGTMVTVSS

SEQ ID NO: 699 - DNA, 744 bp, synthetic construct
  misc_feature 1..744: note = Description of Artificial Sequence: Synthetic polynucleotide
  source 1..744: mol_type = other DNA
aattttatgctgactcagccccactctgtgtcggagtctccggggaagacggtaaccatctcctgcacccgcagcagtggcagcattgccagcaactatgtgcagtggtaccagcagcgcccgggcagtgcccccaccactgtgatctatgaggataaccaaagaccctctggggtccctgatcggttctctggctccatcgacagctcctccaactctgcctccctcaccatctctggactgaagactgaggacgaggctgactactactgtcagtcttatgatagcagcaatgtggtattcggcggagggaccaaggtcaccgtcctaggttctagaggtggtggtggtagcggcggcggcggctctggtggtggtggatccctcgagatggccgaggtgcagctggtggagtctgggggaggcttggtacagcctggagggtccctgagactctcctgtgcagcctctggattcaccttcagtagttatgaaatgaactgggtccgccaggctccagggaaggggctggagtgggtttcatacattagtagtagtggtagtaccatatactacgcagactctgtgaagggccgattcaccatctccagagacaacgccaagaactcactgtatctgcaaatgaacagcctgagagccgaggacacggctgtttattactgtgcacgctgggactacggtatggacgtctggggccaagggaccacggtcaccgtctcctca

SEQ ID NO: 700 - protein, 248 aa, synthetic construct
  REGION 1..248: note = Description of Artificial Sequence: Synthetic polypeptide
NFMLTQPHSVSESPGKTVTISCTRSSGSIASNYVQWYQQRPGSAPTTVIYEDNQRPSGVPDRFSGSIDSSSNSASLTISGLKTEDEADYYCQSYDSSNVVFGGGTKVTVLGSRGGGGSGGGGSGGGGSLEMAEVQLVESGGGLVQPGGSLRLSCAASGFTFSSYEMNWVRQAPGKGLEWVSYISSSGSTIYYADSVKGRFTISRDNAKNSLYLQMNSLRAEDTAVYYCARWDYGMDVWGQGTTVTVSS

SEQ ID NO: 701 - DNA, 753 bp, synthetic construct
  misc_feature 1..753: note = Description of Artificial Sequence: Synthetic polynucleotide
  source 1..753: mol_type = other DNA
tcctatgtgctgactcagccaccctcagtgtccgtgtccccaggacagacagccagcatcacctgctctggagatagattgacgaataaatatgtttcctggtatcaacagaagccaggccagtcccctgtgttggtcatctatgaggatgccaagcggccctcagggatccctgcgcgattctctggctccaactctgggaacacagccactctgaccatcagcgggacccaggctatggatgagtctgaatattactgtcaggcgtgggacagcagtgtggtggtttttggcggagggaccaagctgaccgtcctaggttctagaggtggtggtggtagcggcggcggcggctctggtggtggtggatccctcgagatggccgaggtgcagctggtggagtctgggggaggcttggtacagcctggcaggtccctgagactctcctgtgcagcctctggatttacctttgatgattatgccatgcactgggtccggcaagctccagggaagggcctggagtgggtctcaggtattagttggaatagtggtagtataggctatgcggactctgtgaagggccgattcaccatctccagagacaacgccaagaactccctgtatctgcaaatgaacagtctgagagatgaggacacggccttgtattactgtgcaaaagaccgaggggggggagttatcgttaaggatgcttttgatatctggggccaagggacaatggtcaccgtctcttca

SEQ ID NO: 702 - protein, 251 aa, synthetic construct
  REGION 1..251: note = Description of Artificial Sequence: Synthetic polypeptide
SYVLTQPPSVSVSPGQTASITCSGDRLTNKYVSWYQQKPGQSPVLVIYEDAKRPSGIPARFSGSNSGNTATLTISGTQAMDESEYYCQAWDSSVVVFGGGTKLTVLGSRGGGGSGGGGSGGGGSLEMAEVQLVESGGGLVQPGRSLRLSCAASGFTFDDYAMHWVRQAPGKGLEWVSGISWNSGSIGYADSVKGRFTISRDNAKNSLYLQMNSLRDEDTALYYCAKDRGGGVIVKDAFDIWGQGTMVTVSS

SEQ ID NO: 703 - DNA, 750 bp, synthetic construct
  misc_feature 1..750: note = Description of Artificial Sequence: Synthetic polynucleotide
  source 1..750: mol_type = other DNA
tcctatgagctgactcagccacccgcagcgtctgggacccccggacagagagtcaccatctcttgttctgggggcgtctccaacatcgggagtggtgctctaaattggtaccagcaactcccaggaacggcccccaaactcctcatctatagttacaatcagcggccctcaggggtctctgaccgattctctggctccaggtctgccacctcagcctccctggccatcagtgggctccagtctgaggatgaggctgattattactgtgcaacctgggatgatagtgtgaatggttgggtgttcggcggagggaccaagctgaccgtcctaggttctagaggtggtggtggtagcggcggcggcggctctggtggtggtggatccctcgagatggccgaggtgcagctggtggagtctggagctgaggtgaagaagcctggggattcagtgaaggtctcctgcaagccttctggttacaattttctcaactatggtatcaactgggtgcgacaggcccctggacaagggcttgagtggatgggatggattagcacttacaccggtaacacaaactatgcacagaagctgcagggcagagtcaccttcaccacagacacatccacgagcacagcctacatggagatgaggagcctgagatctgacgacacggccgtgtattactgtgcgcgccagcagggtggtggttggtacgatgtttggggtcaaggtactctggtcaccgtctcctca

SEQ ID NO: 704 - protein, 250 aa, synthetic construct
  REGION 1..250: note = Description of Artificial Sequence: Synthetic polypeptide
SYELTQPPAASGTPGQRVTISCSGGVSNIGSGALNWYQQLPGTAPKLLIYSYNQRPSGVSDRFSGSRSATSASLAISGLQSEDEADYYCATWDDSVNGWVFGGGTKLTVLGSRGGGGSGGGGSGGGGSLEMAEVQLVESGAEVKKPGDSVKVSCKPSGYNFLNYGINWVRQAPGQGLEWMGWISTYTGNTNYAQKLQGRVTFTTDTSTSTAYMEMRSLRSDDTAVYYCARQQGGGWYDVWGQGTLVTVSS

SEQ ID NO: 705 - DNA, 768 bp, synthetic construct
  misc_feature 1..768: note = Description of Artificial Sequence: Synthetic polynucleotide
  source 1..768: mol_type = other DNA
cagtctgtcgtgacgcagccgccctcagtgtctgcggccccaggagagaaggtcaccatctcctgctctggaagcaacttcaatgttggaaataatgatgtatcctggtatcagcaactcccaggtgcagcccccaaactcctcatttatgacaataataagcgaccctcagggattcctgaccgattctctggctccaagtctggcacgtcagccaccctggacatcaccgggctccacagtgacgacgaggccgattattactgcggaacatgggatagcagcctgaatactgggggggtcttcggaactgggaccaaggtcaccgtcctaggttctagaggtggtggtggtagcggcggcggcggctctggtggtggtggatccctcgagatggccgaggtccagctggtgcagtctggagctgaggtgaagaagcctggggcctcagtgaaggtctcctgcaaggcttctggttacacctttaccagctatactatcagctgggtacgacaggcccctggacaagggcttgagtggatgggatggatcagcacttacaatggtctcacaaactatgcacagaacctccagggcagagtcaccatgactacagacacattcacgaccacagcctacatggagctgaggagcctcagatctgacgacacggccgtgtattactgtgtgagagaggggtcccccgactacggtgacttcgcgtcctttgactactggggccagggaaccctggtcaccgtctcctca

SEQ ID NO: 706 - protein, 256 aa, synthetic construct
  REGION 1..256: note = Description of Artificial Sequence: Synthetic polypeptide
QSVVTQPPSVSAAPGEKVTISCSGSNFNVGNNDVSWYQQLPGAAPKLLIYDNNKRPSGIPDRFSGSKSGTSATLDITGLHSDDEADYYCGTWDSSLNTGGVFGTGTKVTVLGSRGGGGSGGGGSGGGGSLEMAEVQLVQSGAEVKKPGASVKVSCKASGYTFTSYTISWVRQAPGQGLEWMGWISTYNGLTNYAQNLQGRVTMTTDTFTTTAYMELRSLRSDDTAVYYCVREGSPDYGDFASFDYWGQGTLVTVSS

SEQ ID NO: 707 - DNA, 768 bp, synthetic construct
  misc_feature 1..768: note = Description of Artificial Sequence: Synthetic polynucleotide
  source 1..768: mol_type = other DNA
cagtctgtgttgacgcagccgccctcagtgtctgcgcccccgggacagaaggtcaccatctcctgctctggaagcagctccaacattgggaataattatgtatcctggtaccagcagttcccaggaacagcccccaaactcctcatttatgacaataataagcgaccctcagggatttctgaccgattctctggctccaagtctggcacgtcagccaccctgggcatcgccggactccagactggggacgaggccgattattactgcggaacatgggataccagcctgagtggtttttatgtcttcggaagtgggaccaaggtcaccgtcctaggttctagaggtggtggtggtagcggcggcggcggctctggtggtggtggatccctcgagatggccgaggtccagctggtacagtctggagctgaggtgaagaagcctggggcctcagtgaaggtctcctgcaaggcttctggttacacctttaccagctatactatcagctgggtacgacaggcccctggacaagggcttgagtggatgggatggatcagcacttacaatggtctcacaaactatgcacagaacctccagggcagagtcaccatgactacagacacattcacgaccacagcctacatggagctgaggagcctcagatctgacgacacggccgtgtattactgtgtgagagaggggtcccccgactacggtgacttcgcgtcctttgactactggggccagggaaccctggtcaccgtctcctca

SEQ ID NO: 708 - protein, 256 aa, synthetic construct
  REGION 1..256: note = Description of Artificial Sequence: Synthetic polypeptide
QSVLTQPPSVSAPPGQKVTISCSGSSSNIGNNYVSWYQQFPGTAPKLLIYDNNKRPSGISDRFSGSKSGTSATLGIAGLQTGDEADYYCGTWDTSLSGFYVFGSGTKVTVLGSRGGGGSGGGGSGGGGSLEMAEVQLVQSGAEVKKPGASVKVSCKASGYTFTSYTISWVRQAPGQGLEWMGWISTYNGLTNYAQNLQGRVTMTTDTFTTTAYMELRSLRSDDTAVYYCVREGSPDYGDFASFDYWGQGTLVTVSS

SEQ ID NO: 709 - DNA, 765 bp, synthetic construct
  misc_feature 1..765: note = Description of Artificial Sequence: Synthetic polynucleotide
  source 1..765: mol_type = other DNA
ctgcctgtgctgactcagccaccctcagcgtctgcgacccccgggcagagggtcaccatctcttgttctggaaccacctccaacatcggaagtaatactgtacactggtaccagcagctcccagggacggcccccaaactcctcatctataataataatcagcggccctcaggggtccctgaccgattctctggctccaagtctggcacctcagcctccctggccatcagtgggctccggtccgaggatgaggctacatattcctgtgcaacatgggatgacagcctgagtggtgtggtcttcggcggagggaccaagctgaccgtcctaggttctagaggtggtggtggtagcggcggcggcggctctggtggtggtggatccctcgagatggccgaggtccagctggtgcagtctggggctgaggtgaagaagcctgggtcctcggtgaaggtctcctgcaaggcttctggaggcaccttcagcagctatgctatcagctgggtgcgacaggcccctggacaagggcttgagtggatgggagggatcatccctatctttggtacagcaaactacgcacagaagttccagggcagagtcacgattaccgcggacgaatccacgagcacagcctacatggagctgagcagcctgagatctgaggacacggccgtgtattactgtgcgagagatcccgcctacggtgactacgagtatgatgcttttgatatctggggccaagggacaatggtcaccgtctcttca

SEQ ID NO: 710 - protein, 255 aa, synthetic construct
  REGION 1..255: note = Description of Artificial Sequence: Synthetic polypeptide
LPVLTQPPSASATPGQRVTISCSGTTSNIGSNTVHWYQQLPGTAPKLLIYNNNQRPSGVPDRFSGSKSGTSASLAISGLRSEDEATYSCATWDDSLSGVVFGGGTKLTVLGSRGGGGSGGGGSGGGGSLEMAEVQLVQSGAEVKKPGSSVKVSCKASGGTFSSYAISWVRQAPGQGLEWMGGIIPIFGTANYAQKFQGRVTITADESTSTAYMELSSLRSEDTAVYYCARDPAYGDYEYDAFDIWGQGTMVTVSS

SEQ ID NO: 711 - DNA, 750 bp, synthetic construct
  misc_feature 1..750: note = Description of Artificial Sequence: Synthetic polynucleotide
  source 1..750: mol_type = other DNA
cagtctgtgttgacgcagccgccctcagcgtctgggacccccgggcagagggtcaccatctcttgttctggaagcagctccaacatcggaactaatggtgtaaactggttccagcagttcccaggaacggcccccaaactcctcatctatactaatgatcagcggccctcaggggtccctgaccgattctctggctccaagtctggcacctcagcctccctggccatcagtgggctccagtctgcggatgaggctgattattactgtgcagtgtgggaccacagcctgaatggtccggtgttcggcggagggaccaagctgaccgtcctaggttctagaggtggtggtggtagcggcggcggcggctctggtggtggtggatccctcgagatggcccaggtgcagctggtgcagtctggggctgaggtgaagaagcctgggtcctcggtgaaggtctcctgcaaggcttctggaggcaccttcagcagctatgctatcagctgggtgcgacaggcccctggacaagggcttgagtggatgggagggatcatccctatctttggtacagcaaactacgcacagaagttccagggcagagtcacgattaccgcggacgaatccacgagcacagcctacatggagctgagcagcctgagatctgaggacacggccgtgtattactgtgcgagaggggccggttttgatgcttttgatatctggggccaagggacaatggtcaccgtctcttca

SEQ ID NO: 712 - protein, 250 aa, synthetic construct
  REGION 1..250: note = Description of Artificial Sequence: Synthetic polypeptide
QSVLTQPPSASGTPGQRVTISCSGSSSNIGTNGVNWFQQFPGTAPKLLIYTNDQRPSGVPDRFSGSKSGTSASLAISGLQSADEADYYCAVWDHSLNGPVFGGGTKLTVLGSRGGGGSGGGGSGGGGSLEMAQVQLVQSGAEVKKPGSSVKVSCKASGGTFSSYAISWVRQAPGQGLEWMGGIIPIFGTANYAQKFQGRVTITADESTSTAYMELSSLRSEDTAVYYCARGAGFDAFDIWGQGTMVTVSS

SEQ ID NO: 713 - DNA, 744 bp, synthetic construct
  misc_feature 1..744: note = Description of Artificial Sequence: Synthetic polynucleotide
  source 1..744: mol_type = other DNA
caggctgtgctgactcagccaccctcagcgtctgggacccccgggcagagggtcaccatctcttgttctggaagcagctccaacatcggaagtaatactgtaaactggtaccagcagctcccaggaacggcccccaaactcctcatctatagtaataatcagcggccctcaggggtccctgaccgattctctggctccaagtctggcacctcagcctccctggccatcagtgggctccagtctgaggatgagactgattattactgtgcagcatgggatgacagcctgaatggttatgtcttcggaactgggaccaaggtcaccgtcctaggttctagaggtggtggtggtagcggcggcggcggctctggtggtggtggatccctcgagatggcccaggtgcagctacagcagtggggcgcaggactgttgaagccttcggagaccctgtccctcacctgcgctgtctatggtgggtccttcagtggttactactggagctggatccgccagcccccagggaaggggctggagtggattggggaaatcaatcatagtggaagcaccaactacaacccgtccctcaagagtcgagtcaccatatcagtagacacgtccaagaaccagttctccctgaagctgagctctgtgaccgccgcggacacggctgtgtattactgtgcgagagaggggctagatgcttttgatatctggggccaagggacaatggtcaccgtctcttca

SEQ ID NO: 714 - protein, 248 aa, synthetic construct
  REGION 1..248: note = Description of Artificial Sequence: Synthetic polypeptide
QAVLTQPPSASGTPGQRVTISCSGSSSNIGSNTVNWYQQLPGTAPKLLIYSNNQRPSGVPDRFSGSKSGTSASLAISGLQSEDETDYYCAAWDDSLNGYVFGTGTKVTVLGSRGGGGSGGGGSGGGGSLEMAQVQLQQWGAGLLKPSETLSLTCAVYGGSFSGYYWSWIRQPPGKGLEWIGEINHSGSTNYNPSLKSRVTISVDTSKNQFSLKLSSVTAADTAVYYCAREGLDAFDIWGQGTMVTVSS

SEQ ID NO: 715 - DNA, 744 bp, synthetic construct
  misc_feature 1..744: note = Description of Artificial Sequence: Synthetic polynucleotide
  source 1..744: mol_type = other DNA
caggctgtgctgactcagccaccctcagcgtctgggacccccgggcagagggtcaccatctcttgttctggaagcagctccaacatcggaagtaatactgtaaactggtaccagcagctcccaggaacggcccccaaactcctcatgtatagtaatgatcagcggccctcaggggtccctgaccgattctctggctccaagtctggcacctcagcctccctggccatcagtgggctccagtctgaggatgaggctgattattattgtgcagcatgggatgacagcctgaatggttatgtcttcgcagctgggacccagctcaccgttttaagttctagaggtggtggtggtagcggcggcggcggctctggtggtggtggatccctcgagatggcccaggtgcagctacagcagtggggcgcaggactgttgaagccttcggagaccctgtccctcacctgcgctgtctatggtgggtccttcagtggttactactggagctggatccgccagcccccagggaaggggctggagtggattggggaaatcaatcatagtggaagcaccaactacaacccgtccctcaagagtcgagtcaccatatcagtagacacgtccaagaaccagttctccctgaagctgagctctgtgaccgccgcggacacggctgtgtattactgtgcgagagaggggctagatgcttttgatatctggggccaagggacaatggtcaccgtctcttca

SEQ ID NO: 716 - protein, 248 aa, synthetic construct
  REGION 1..248: note = Description of Artificial Sequence: Synthetic polypeptide
QAVLTQPPSASGTPGQRVTISCSGSSSNIGSNTVNWYQQLPGTAPKLLMYSNDQRPSGVPDRFSGSKSGTSASLAISGLQSEDEADYYCAAWDDSLNGYVFAAGTQLTVLSSRGGGGSGGGGSGGGGSLEMAQVQLQQWGAGLLKPSETLSLTCAVYGGSFSGYYWSWIRQPPGKGLEWIGEINHSGSTNYNPSLKSRVTISVDTSKNQFSLKLSSVTAADTAVYYCAREGLDAFDIWGQGTMVTVSS

SEQ ID NO: 717 - DNA, 768 bp, synthetic construct
  misc_feature 1..768: note = Description of Artificial Sequence: Synthetic polynucleotide
  source 1..768: mol_type = other DNA
cagtctgtcgtgacgcagccgccctcagtgtctgcggccccaggacagaaggtcaccatctcctgctctggaagcagctccaacattgggaataattatgtatcctggtaccagcagctcccaggaacagcccccaaactcctcatttatgacaataataagcgaccctcagggattcctgaccgattctctggctccaagtctggcacgtcagccaccctgggcatcactggactccagactggggacgaggccgattattactgcggaacatgggatagcagcctgagtgctgcttatgtcttcggaactgggaccaaggtcaccgtcctaggttctagaggtggtggtggtagcggcggcggcggctctggtggtggtggatccctcgagatggcccaggtccagctggtacagtctggagctgaggtgaagaagcctggggcctcagtgaaggtctcctgcaaggcttctggttacagctttaccagctatactatcagctgggttcgacaggcccctggacaaggccttgagtggatgggatgggtcagcacttacaatggtctcagaaactatgcacagaacctccagggcagagtcaccatgactacagacacactcacgaccacagcctacatggagctgaggagcctcagatctgacgacacggccgtgtattattgtgtgagagaggggtcccccgactacggtgacttcgcggcctttgactactggggccagggcaccctggtcaccgtctcctca

SEQ ID NO: 718 - protein, 256 aa, synthetic construct
  REGION 1..256: note = Description of Artificial Sequence: Synthetic polypeptide
QSVVTQPPSVSAAPGQKVTISCSGSSSNIGNNYVSWYQQLPGTAPKLLIYDNNKRPSGIPDRFSGSKSGTSATLGITGLQTGDEADYYCGTWDSSLSAAYVFGTGTKVTVLGSRGGGGSGGGGSGGGGSLEMAQVQLVQSGAEVKKPGASVKVSCKASGYSFTSYTISWVRQAPGQGLEWMGWVSTYNGLRNYAQNLQGRVTMTTDTLTTTAYMELRSLRSDDTAVYYCVREGSPDYGDFAAFDYWGQGTLVTVSS

SEQ ID NO: 719 - DNA, 741 bp, synthetic construct
  misc_feature 1..741: note = Description of Artificial Sequence: Synthetic polynucleotide
  source 1..741: mol_type = other DNA
caggctgtgctgactcagccaccctcagcgtctgagacccccgggcagagggtcaccatctcttgttctggaagcaggtccaacatcggaactaatattgtacactggtaccagcagcgcccaggaatggcccccaaactcctcacttatggtagtcggcggccctcaggggtcccggaccgattctctggctccaagtttggcacctcagcctccctggccatcagtgggctccagtctgaggatgaggctgattattattgtgcagcatgggatgacagtctgaatggtccggctttcggcggagggaccaagctgaccgtcctaggttctagaggtggtggtggtagcggcggcggcggctctggtggtggtggatccctcgagatggcccaggtgcagctacagcagtggggcgcaggactgttgaagccttcggagaccctgtccctcacctgcgctgtctatggtgggtccttcagtggttactactggagctggatccgccagcccccagggaaggggctggagtggattggggaaatcaatcatagtggaagcaccaactacaacccgtccctcaagagtcgagtcaccatatcagtagacacgtccaagaaccagttctccctgaagctgagctctgtgaccgccgcggacacggctgtgtattactgtgcgagagacggtgggggctactttgactactggggccagggaaccctggtcaccgtctcctca

SEQ ID NO: 720 - protein, 247 aa, synthetic construct
  REGION 1..247: note = Description of Artificial Sequence: Synthetic polypeptide
QAVLTQPPSASETPGQRVTISCSGSRSNIGTNIVHWYQQRPGMAPKLLTYGSRRPSGVPDRFSGSKFGTSASLAISGLQSEDEADYYCAAWDDSLNGPAFGGGTKLTVLGSRGGGGSGGGGSGGGGSLEMAQVQLQQWGAGLLKPSETLSLTCAVYGGSFSGYYWSWIRQPPGKGLEWIGEINHSGSTNYNPSLKSRVTISVDTSKNQFSLKLSSVTAADTAVYYCARDGGGYFDYWGQGTLVTVSS

SEQ ID NO: 721 - DNA, 762 bp, synthetic construct
  misc_feature 1..762: note = Description of Artificial Sequence: Synthetic polynucleotide
  source 1..762: mol_type = other DNA
cagtctgtgttgacgcagccgccctcagtgtctggggccccagggcagagggtcaccatctcctgcactgggagcagctccaatatcggggcacgttatgatgtacactggtaccagcaactcccaggaacagccccccgactcctcatctctgctaactacgatcggccctcaggggtccctgaccgattctctggctccaagtctggcacctcagcctccctggccatcactgggctccaggctgaggatgaggctgattattactgccagtcctatgacagcagtgtgagtgcttgggtgttcggcggagggaccaaggtcaccgtcctaggttctagaggtggtggtggtagcggcggcggcggctctggtggtggtggatccctcgagatggccgaagtgcagctggtgcagtctggggctgaagtgaaggagcctggggcctcagtgaggatctcctgccaggcatctggatacaacttcatcagttattatatgcactgggtgcggcaggcccctgggcaaggtcttgagtggatgggcaccatcaacccaggcagtggtgagacagactactcacagaagttgcagggcagagtcaccatgaccagggacccgtccacgggtacattcgacatggggctgagcagcctgacatctggggacacggccgtctattattgtgcgacaggtctcatcagaggagctagcgatgcttttaatatctggggccgggggacaatggtcaccgtctcttca

SEQ ID NO: 722 - protein, 254 aa, synthetic construct
  REGION 1..254: note = Description of Artificial Sequence: Synthetic polypeptide
QSVLTQPPSVSGAPGQRVTISCTGSSSNIGARYDVHWYQQLPGTAPRLLISANYDRPSGVPDRFSGSKSGTSASLAITGLQAEDEADYYCQSYDSSVSAWVFGGGTKVTVLGSRGGGGSGGGGSGGGGSLEMAEVQLVQSGAEVKEPGASVRISCQASGYNFISYYMHWVRQAPGQGLEWMGTINPGSGETDYSQKLQGRVTMTRDPSTGTFDMGLSSLTSGDTAVYYCATGLIRGASDAFNIWGRGTMVTVSS

SEQ ID NO: 723 - DNA, 750 bp, synthetic construct
  misc_feature 1..750: note = Description of Artificial Sequence: Synthetic polynucleotide
  source 1..750: mol_type = other DNA
cagcctgtgctgactcagccaccctcagtgtccgtgtccccaggacagacggccgccatcccctgttctggagataagttgggggataaatttgcttcctggtatcagcagaagccaggccagtcccctgtgctggtcatctatcaagatactaagcggccctcagggatccctgagcgattctctggctccaactctgggaacacagccactctgaccatcagcgggacccaggctatggatgaggctgactattactgtcagacgtgggccagcggcattgtggtgttcggcggagggaccaagctgaccgtcctaggttctagaggtggtggtggtagcggcggcggcggctctggtggtggtggatccctcgagatggcccaggtacagctgcagcagtcaggtccaggactggtgaagccctcgcagaccctctcactcacctgtgccatctccggggacagtgtctctagcaacagtgctgcttggaactggatcaggcagtccccatcgagaggccttgagtggctgggaaggacatactacaggtccaagtggtataatgattatgcagtatctgtgaaaagtcgaataaccatcaacccagacacatccaagaaccagttctccctgcagctgaactctgtgactcccgaggacacggctgtgtattactgtgcaagagagcgcagtggctggaagggatttgactactggggccagggaaccctggtcaccgtctcctca

SEQ ID NO: 724 - protein, 250 aa, synthetic construct
  REGION 1..250: note = Description of Artificial Sequence: Synthetic polypeptide
QPVLTQPPSVSVSPGQTAAIPCSGDKLGDKFASWYQQKPGQSPVLVIYQDTKRPSGIPERFSGSNSGNTATLTISGTQAMDEADYYCQTWASGIVVFGGGTKLTVLGSRGGGGSGGGGSGGGGSLEMAQVQLQQSGPGLVKPSQTLSLTCAISGDSVSSNSAAWNWIRQSPSRGLEWLGRTYYRSKWYNDYAVSVKSRITINPDTSKNQFSLQLNSVTPEDTAVYYCARERSGWKGFDYWGQGTLVTVSS

SEQ ID NO: 725 - DNA, 759 bp, synthetic construct
  misc_feature 1..759: note = Description of Artificial Sequence: Synthetic polynucleotide
  source 1..759: mol_type = other DNA
gatgttgtgatgactcagtctccaccctccctgtccgtcacccctggagagccggcctccatcacctgcaggtctagtcagagcctcctggaaagaaatgcatacaactacttggattggtacctgcagaggccaggacagtctccacagctcctgatctacttgggttctaatcgggccgccggggtccctgacaggttcagtggcagtggatcaggcagagattttacactgaaaatcagcagagtggagcctgaggatgttggggtttattactgcatgcaagctctacaagctccgttcactttcggcggagggaccaaggtggagatcaaacgttctagaggtggtggtggtagcggcggcggcggctctggtggtggtggatccctcgagatggccgaagtgcagctggtgcagtctgggggaggcttggtacagcctggggggtccctgagactctcctgtgcagcctctggattcacctttagcagctatgccatgagctgggtccgccaggctccagggaaggggctggagtgggtctcagctattagtggtagtggtggtagcacatactacgcagactccgtgaagggccggttcaccatctccagagacaattccaagaacacgctgtatctgcaaatgaacagcctgagagccgaggacacggccgtatattactgtgcgaaatggggcccgtttcaggatgcttttgatatctggggccaagggacaatggtcaccgtctcttca

SEQ ID NO: 726 - protein, 253 aa, synthetic construct
  REGION 1..253: note = Description of Artificial Sequence: Synthetic polypeptide
DVVMTQSPPSLSVTPGEPASITCRSSQSLLERNAYNYLDWYLQRPGQSPQLLIYLGSNRAAGVPDRFSGSGSGRDFTLKISRVEPEDVGVYYCMQALQAPFTFGGGTKVEIKRSRGGGGSGGGGSGGGGSLEMAEVQLVQSGGGLVQPGGSLRLSCAASGFTFSSYAMSWVRQAPGKGLEWVSAISGSGGSTYYADSVKGRFTISRDNSKNTLYLQMNSLRAEDTAVYYCAKWGPFQDAFDIWGQGTMVTVSS

SEQ ID NO: 727 - DNA, 768 bp, synthetic construct
  misc_feature 1..768: note = Description of Artificial Sequence: Synthetic polynucleotide
  source 1..768: mol_type = other DNA
caggctgtgctgactcagcctgcctccgtgtctgggtctcctggacagtcgatcaccatctcctgcactggaaccagcagtgacgttggtggttataactatgtctcctggtaccaacagcacccgggcaaagcccccaaactcatgatttatgaggtcagtaatcggccctcaggggtttctaatcgcttctctggctccaagtctggcaacacggcctccctgaccatctctgggctccaggctgaggacgaggctgattattactgcagctcatatacaagcagcagcaccccttatgtcttcggagcagggaccaaggtcaccgtcctaggttctagaggtggtggtggtagcggcggcggcggctctggtggtggtggatccctcgagatggccgaggtgcagctggtggagtctgggggaggcttggtacagcctggcaggtccctgagactctcctgtgcagcctctggattcacctttgatgattatgccatgcactgggtccggcaagctccagggaagggcctggagtgggtctcaggtattagttggaatagtggtagcataggctatgcggactctgtgaagggccgattcaccatctccagagacaacgccaagaactccctgtatctgcaaatgaacagtctgagagctgaggacacggccttgtattactgtgcaaaagccaggtggacagcagtggcatcagaccaccactttgactactggggccagggaacgctggtcaccgtctcctca

SEQ ID NO: 728 - protein, 256 aa, synthetic construct
  REGION 1..256: note = Description of Artificial Sequence: Synthetic polypeptide
QAVLTQPASVSGSPGQSITISCTGTSSDVGGYNYVSWYQQHPGKAPKLMIYEVSNRPSGVSNRFSGSKSGNTASLTISGLQAEDEADYYCSSYTSSSTPYVFGAGTKVTVLGSRGGGGSGGGGSGGGGSLEMAEVQLVESGGGLVQPGRSLRLSCAASGFTFDDYAMHWVRQAPGKGLEWVSGISWNSGSIGYADSVKGRFTISRDNAKNSLYLQMNSLRAEDTALYYCAKARWTAVASDHHFDYWGQGTLVTVSS

SEQ ID NO: 729 - DNA, 744 bp, synthetic construct
  misc_feature 1..744: note = Description of Artificial Sequence: Synthetic polynucleotide
  source 1..744: mol_type = other DNA
caggctgtgcttactcagccaccctcagcgtctgggacccccgggcagagggtcaccatctcttgttctggaagcagctccaacatcggaagtaatactgtaaactggtaccagcagctcccaggaacggcccccaaactcctcatctatagtaataatcagcggccctcaggggtccctgaccgattctctggctccaagtctggcacctcagcctccctggccatcagtgggctccagtctgaggatgaggctgattattactgtgcagcatgggatgacagcctgaatggttatgtcttcggaactgggaccaagctgaccgtcctaggttctagaggtggtggtggtagcggcggcggcggctctggtggtggtggatccctcgagatggccgaggtgcagctggtgcagtctggggctgaggtgaagaagcctgggtcctcggtgaaggtctcctgcaaggcttctggaggcaccttcagcagctatgctatcagctgggtgcgacaggcccctggacaagggcttgagtggatgggagggatcatccctatctttggtacagcaaactacgcacagaagttccagggcagagtcacgattaccgcggacgaatccacgagcacagcctacatggagctgagcagcctgagatctgaggacacggccgtgtattactgtgcgagagattgggactacatggacgtctggggcaaagggaccacggtcaccgtctcctca

SEQ ID NO: 730 - protein, 248 aa, synthetic construct
  REGION 1..248: note = Description of Artificial Sequence: Synthetic polypeptide
QAVLTQPPSASGTPGQRVTISCSGSSSNIGSNTVNWYQQLPGTAPKLLIYSNNQRPSGVPDRFSGSKSGTSASLAISGLQSEDEADYYCAAWDDSLNGYVFGTGTKLTVLGSRGGGGSGGGGSGGGGSLEMAEVQLVQSGAEVKKPGSSVKVSCKASGGTFSSYAISWVRQAPGQGLEWMGGIIPIFGTANYAQKFQGRVTITADESTSTAYMELSSLRSEDTAVYYCARDWDYMDVWGKGTTVTVSS

SEQ ID NO: 731 - DNA, 777 bp, synthetic construct
  misc_feature 1..777: note = Description of Artificial Sequence: Synthetic polynucleotide
  source 1..777: mol_type = other DNA
tcctatgagctgactcagccaccctcagcgtctgggacccccgggcagagggtcaccatctcttgttctggaagcagctccaacatcggaagtaatactgtaaactggtaccagcagctcccaggaacggcccccaaactcctcatctatagtaataatcagcggccctcaggggtccctgaccgattctctggctccaagtctggcacctcagcctccctggccatcagtgggctccagtctgaggatgaggctgattattactgtgcagcatgggatgacagcctgaatggttatgtcttcggaactgggaccaaggtcaccgtcctaggttctagaggtggtggtggtagcggcggcggcggctctggtggtggtggatccctcgagatggccgaggtgcagctggtggagtctggagctgaggtgaagaagcctggggcctcagtgaaggtctcctgcaaggcttctggttacacctttaccagctatggtatcagctgggtgcgacaggcccctggacaagggcttgagtggatgggatggatcagcgcttacaatggtaacacaaactatgcacagaagctccagggcagagtcaccatgaccacagacacatccacgagcacagcctacatggagctgaggagcctgagatctgacgacacggccgtgtattactgtgcgagagacctatctcggggagctaacccgcattactactactactacggtatggacgtctggggccaagggaccacggtcaccgtctcctca

SEQ ID NO: 732 - protein, 259 aa, synthetic construct
  REGION 1..259: note = Description of Artificial Sequence: Synthetic polypeptide
SYELTQPPSASGTPGQRVTISCSGSSSNIGSNTVNWYQQLPGTAPKLLIYSNNQRPSGVPDRFSGSKSGTSASLAISGLQSEDEADYYCAAWDDSLNGYVFGTGTKVTVLGSRGGGGSGGGGSGGGGSLEMAEVQLVESGAEVKKPGASVKVSCKASGYTFTSYGISWVRQAPGQGLEWMGWISAYNGNTNYAQKLQGRVTMTTDTSTSTAYMELRSLRSDDTAVYYCARDLSRGANPHYYYYYGMDVWGQGTTVTVSS

SEQ ID NO: 733 - DNA, 780 bp, synthetic construct
  misc_feature 1..780: note = Description of Artificial Sequence: Synthetic polynucleotide
  source 1..780: mol_type = other DNA
cagtctgtgttgacgcagccgccctcagtgtctggggccccagggcagagggtcaccgtctcctgcactgggagcagatccaacatcggggcaggatatgatgtacactggtaccagcaacttccaggaacagcccccaaactcctcatctatggaaatagtaatcggcctccaggggtccctgaccgattctctgggtctaagtctggcacctcagcctccctggtcatcactgggctccaggctgaggatgccgctgattattactgccagtcctatgacaacactgtgcgtgaatcaccttatgtcttcggaactgggaccaaggtcaccgtcctaggttctagaggtggtggtggtagcggcggcggcggctctggtggtggtggatccctcgagatggccgaggtccagctggtacagtctggggctgaggtgaagaagcctggggcctcagtgaaggtctcctgcaaggtttccggatacaccctcactgaattatccatgcactgggtgcgacaggctcctggaaaagggcttgagtggatgggaggttttgatcctgaagatggtgaaacaatctacgcacagaagttccagggcagagtcaccatgaccgaggacacatctacagacacagcctacatggagctgagcagcctgagatctgaggacacggccgtgtattactgtgcaacagagagtaatttagtgtcccggcactactactactacggtatggacgtctggggccaagggaccacggtcaccgtctcctca

SEQ ID NO: 734 - protein, 260 aa, synthetic construct
  REGION 1..260: note = Description of Artificial Sequence: Synthetic polypeptide
QSVLTQPPSVSGAPGQRVTVSCTGSRSNIGAGYDVHWYQQLPGTAPKLLIYGNSNRPPGVPDRFSGSKSGTSASLVITGLQAEDAADYYCQSYDNTVRESPYVFGTGTKVTVLGSRGGGGSGGGGSGGGGSLEMAEVQLVQSGAEVKKPGASVKVSCKVSGYTLTELSMHWVRQAPGKGLEWMGGFDPEDGETIYAQKFQGRVTMTEDTSTDTAYMELSSLRSEDTAVYYCATESNLVSRHYYYYGMDVWGQGTTVTVSS

SEQ ID NO: 735 - DNA, 792 bp, synthetic construct
  misc_feature 1..792: note = Description of Artificial Sequence: Synthetic polynucleotide
  source 1..792: mol_type = other DNA
ctgcctgtgctgactcagccaccctcagcgtctgggacccccgggcagagggtcaccatctcttgttctggaaccagctccaacatcggaagtaattctgtagactggtaccagcagctcccaggaacggcccccaaactcctcatctatagtaataatcagcggccctcaggggtccctgaccgaatctctggctccaagtctggcacctcagcctccctggccatcagtgggctccagtctgaggatgaggctgattattactgtgcagcatgggatgacagcctgaatggttatgtcttcggaactgggaccaaggtcaccgtcctaggttctagaggtggtggtggtagcggcggcggcggctctggtggtggtggatccctcgagatggccgaagtgcagctggtgcagtctggggctgaggtgaagaagcctggggcctcagtgaaggtctcctgcaaggcttctggatacaccttcaccggctactatatgcactgggtgcgacaggcccctggacaagggcttgagtggatgggatggatcaaccctaacagtggtggcacaaactatgcacagaagtttcagggcagggtcaccatgaccagggacacgtccatcagcacagcctacatggagctgagcaggctgagatctgacgacacggccgtgtattactgtgcgagagattacggatactatggttcggggagttattcgagcggccccctttactactactacggtatggacgtctggggccaagggaccacggtcaccgtctcctca

SEQ ID NO: 736 - protein, 264 aa, synthetic construct
  REGION 1..264: note = Description of Artificial Sequence: Synthetic polypeptide
LPVLTQPPSASGTPGQRVTISCSGTSSNIGSNSVDWYQQLPGTAPKLLIYSNNQRPSGVPDRISGSKSGTSASLAISGLQSEDEADYYCAAWDDSLNGYVFGTGTKVTVLGSRGGGGSGGGGSGGGGSLEMAEVQLVQSGAEVKKPGASVKVSCKASGYTFTGYYMHWVRQAPGQGLEWMGWINPNSGGTNYAQKFQGRVTMTRDTSISTAYMELSRLRSDDTAVYYCARDYGYYGSGSYSSGPLYYYYGMDVWGQGTTVTVSS

SEQ ID NO: 737 - DNA, 777 bp, synthetic construct
  misc_feature 1..777: note = Description of Artificial Sequence: Synthetic polynucleotide
  source 1..777: mol_type = other DNA
caggctgtgctgactcagccaccctcagcgtctgggacccccgggcagagggtcaccatctcttgttctggaagcagctccaacatcggaagtaatactgtaaactggtaccagcagctcccaggaacggcccccaaactcctcatgtataataatgatcagcggccctcaggggtccctgaccgattctctggctccaagtctggcacctcagcctccctggccatcagtgggctccagtctgaggatgaggctgattattactgtgcagcatgggatgacagcctcaatggttatgtcttcggacctgggaccaaggtcaccgtcctaggttctagaggtggtggtggtagcggcggcggcggctctggtggtggtggatccctcgagatggcccaggtgcagctggtggagtctggagctgaggtgaagaagcctggggcctcagtgaaggtctcctgcaaggcttctggttacacctttaccagctatggtatcagctgggtgcgacaggcccctggacaagggcttgagtggatgggatggatcagcgcttacaatggtaacacaaactatgcacagaagctccagggcagagtcaccatgaccacagacacatccacgagcacagcctacatggagctgaggagcctgagatctgacgacacggccgtgtattactgtgcgagagacctatctcggggagctaacccgcattactactactactacggtatggacgtctggggccaagggaccacggtcaccgtctcctca

SEQ ID NO: 738 - protein, 259 aa, synthetic construct
  REGION 1..259: note = Description of Artificial Sequence: Synthetic polypeptide
QAVLTQPPSASGTPGQRVTISCSGSSSNIGSNTVNWYQQLPGTAPKLLMYNNDQRPSGVPDRFSGSKSGTSASLAISGLQSEDEADYYCAAWDDSLNGYVFGPGTKVTVLGSRGGGGSGGGGSGGGGSLEMAQVQLVESGAEVKKPGASVKVSCKASGYTFTSYGISWVRQAPGQGLEWMGWISAYNGNTNYAQKLQGRVTMTTDTSTSTAYMELRSLRSDDTAVYYCARDLSRGANPHYYYYYGMDVWGQGTTVTVSS

SEQ ID NO: 739 - DNA, 756 bp, synthetic construct
  misc_feature 1..756: note = Description of Artificial Sequence: Synthetic polynucleotide
  source 1..756: mol_type = other DNA
aattttatgctgactcagccccacgctgtgtcggagtctccggggaagacggtaaccatctcctgcacccgcagcagtggcagtattgccagcaactatgtgcagtggtaccagcagcgcccgggcagttccccccgcactgtgatttatgaggataatcaaagaccctctggggtccctggtcggttctctggctccatcgacagctcctccaactctgcctccctcaccatctctggactgaagactgaggacgaggctgactactactgtcagtcttatgattccaccagtgtgcttttcggcggagggaccaagctgaccgtcctaggttctagaggtggtggtggtagcggcggcggcggctctggtggtggtggatccctcgagatggccgaggtccagctggtgcagtctggggctgaggtgaagaagccagggtcctcggtgaaggtctcctgcaaggcctcgggaggcaccttcagcagcaattctctcagctgggtgcgacaggcccctggacaagggcttgagtggatgggaaggatcttccctatcctgggtataacaaactatgcacagaagttccagggcagagtcacgattaccgcggacaaatccacgagcacagcctacatggagctgagcagcctgagatctgaggacacggccgtctattactgtgcgagaggaaactaccaatggtatgatgcttttgatatctggggccaagggacaatggtcaccgtctcttca

SEQ ID NO: 740 - protein, 252 aa, synthetic construct
  REGION 1..252: note = Description of Artificial Sequence: Synthetic polypeptide
NFMLTQPHAVSESPGKTVTISCTRSSGSIASNYVQWYQQRPGSSPRTVIYEDNQRPSGVPGRFSGSIDSSSNSASLTISGLKTEDEADYYCQSYDSTSVLFGGGTKLTVLGSRGGGGSGGGGSGGGGSLEMAEVQLVQSGAEVKKPGSSVKVSCKASGGTFSSNSLSWVRQAPGQGLEWMGRIFPILGITNYAQKFQGRVTITADKSTSTAYMELSSLRSEDTAVYYCARGNYQWYDAFDIWGQGTMVTVSS

SEQ ID NO: 741 - DNA, 744 bp, synthetic construct
  misc_feature 1..744: note = Description of Artificial Sequence: Synthetic polynucleotide
  source 1..744: mol_type = other DNA
cagcctgtgctgactcagccaccctcagtgtcagtggtcccaggaaagacggccaggattacctgtgggggaaaaaacattggaagtaaaagtgtgcactggtaccagcagaagccaggccaggcccctgtggtggtcatccattatgatagtgaccggccctcagggatccctgagcgattctctggctccaactctgggaacacggccaccctgaccatcagcagggtcgaagccggggatgaggccgactattactgtcaggtgtgggatagtagtagtgatcatccttatgtcttcggaactgggaccaaggtcaccgtcctaggttctagaggtggtggtggtagcggcggcggcggctctggtggtggtggatccctcgagatggcccaggtgcagctggtgcagtctggagctgaggtgaagaagcctggggcctcagtgaaggtctcctgcaaggcttctggttacacctttaccaactatggtatcagctgggtgcgacaggcccctggacaagggcttgagtggatgggatggatcagcgcttacaatggtaacacaaactatgcacataagctccagggcagagtcaccatgaccacagacacatccacgagcacagccaacatggagctgaggagcctgagacctgacgacactgccgtgtattactgtgcgcgctcttacttcggttctcatgattactggggtcaaggtactctggtgaccgtctcctca

SEQ ID NO: 742 - protein, 248 aa, synthetic construct
  REGION 1..248: note = Description of Artificial Sequence: Synthetic polypeptide
QPVLTQPPSVSVVPGKTARITCGGKNIGSKSVHWYQQKPGQAPVVVIHYDSDRPSGIPERFSGSNSGNTATLTISRVEAGDEADYYCQVWDSSSDHPYVFGTGTKVTVLGSRGGGGSGGGGSGGGGSLEMAQVQLVQSGAEVKKPGASVKVSCKASGYTFTNYGISWVRQAPGQGLEWMGWISAYNGNTNYAHKLQGRVTMTTDTSTSTANMELRSLRPDDTAVYYCARSYFGSHDYWGQGTLVTVSS

SEQ ID NO: 743 - DNA, 759 bp, synthetic construct
  misc_feature 1..759: note = Description of Artificial Sequence: Synthetic polynucleotide
  source 1..759: mol_type = other DNA
tcctatgtgctgactcagccaccctcggtgtcagtggccccaggaaagacggccaggatttcctgtgggggaaacgacattggaagtaaaagtgttttctggtatcagcagaggccaggccaggcccctgtgttggtcgtctatgatgatagcgaccggccctcagggctccctgagcgattctctggcttcaactctgggaacacggccaccctgaccatcagcagggtcgaagccggggatgaggccgactattactgtcaagtgtgggatagtagtagtgatcattatgtcttcggaactgggaccaaggtcaccgtcctaggttctagaggtggtggtggtagcggcggcggcggctctggtggtggtggatccctcgagatggcccaggtgcagctggtggagtctgggggaggcttggtacagcctggcaggtccctgagactctcctgtgcagcctctggattcacctttgatgattatgccatgcactgggtccggcaagctccagggaagggcctggagtgggtctcaggtattagttggaatagtggtagcataggctatgcggactctgtgaagggccgattcaccatctccagagacaacgccaagaactccctgtatctgcaaatgaacagtctgagagctgaggacacggccttgtattactgtgcaaaagatataacctatggttcggggagttatggtgcttttgatatctggggccaagggacaatggtcaccgtctcttca

SEQ ID NO: 744 - protein, 253 aa, synthetic construct
  REGION 1..253: note = Description of Artificial Sequence: Synthetic polypeptide
SYVLTQPPSVSVAPGKTARISCGGNDIGSKSVFWYQQRPGQAPVLVVYDDSDRPSGLPERFSGFNSGNTATLTISRVEAGDEADYYCQVWDSSSDHYVFGTGTKVTVLGSRGGGGSGGGGSGGGGSLEMAQVQLVESGGGLVQPGRSLRLSCAASGFTFDDYAMHWVRQAPGKGLEWVSGISWNSGSIGYADSVKGRFTISRDNAKNSLYLQMNSLRAEDTALYYCAKDITYGSGSYGAFDIWGQGTMVTVSS

SEQ ID NO: 745 - DNA, 822 bp, synthetic construct
  misc_feature 1..822: note = Description of Artificial Sequence: Synthetic polynucleotide
  source 1..822: mol_type = other DNA
cagtctgtgttgacgcagccaccctcagcgtctgggacccccgggcagagggtcaccatctcttgttctggaagcagctccaacatcggaagtaatactgtaaactggtaccagcagctcccaggaacggcccccaaactcctcatctatagtaataatcagcggccctcaggggtccctgaccgattctctggctccaagtctggcacctcagcctccctggccatcagtgggctccagtctgaggatgaggctgattattactgtgcagcatgggatgacagcctgaatggttatgtcttcggaactgggaccaaggtcaccgtcctaggttctagaggtggtggtggtagcggcggcggcggctctggtggtggtggatccctcgagatggcccaggtgcagctacagcagtggggcgcaggactgttgaagccttcggagaccctgtccctcacctgcgctgtgtatggtgggtccttcagtggttactactggagctggatccgccagcccccagggaaggggctggagtggattggggaaatcaatcatagtggaagcaccaactacaacccgtccctcaagagtcgagtcaccatatcagtagacacgtccaagaaccagttctccctgaagctgagctctgtgaccgccgcggacacggccgtgtattactgtgcgcgcgaaggtccgtacgacggtttcgattcttggggtcaaggtactctggtgaccgtctcctcaactagtggccaggccggccagcaccatcaccatcaccatggcgcatacccgtacgacgttccggactacgcttct

SEQ ID NO: 746 - protein, 274 aa, synthetic construct
  REGION 1..274: note = Description of Artificial Sequence: Synthetic polypeptide
QSVLTQPPSASGTPGQRVTISCSGSSSNIGSNTVNWYQQLPGTAPKLLIYSNNQRPSGVPDRFSGSKSGTSASLAISGLQSEDEADYYCAAWDDSLNGYVFGTGTKVTVLGSRGGGGSGGGGSGGGGSLEMAQVQLQQWGAGLLKPSETLSLTCAVYGGSFSGYYWSWIRQPPGKGLEWIGEINHSGSTNYNPSLKSRVTISVDTSKNQFSLKLSSVTAADTAVYYCAREGPYDGFDSWGQGTLVTVSSTSGQAGQHHHHHHGAYPYDVPDYAS

SEQ ID NO: 747 - DNA, 822 bp, synthetic construct
  misc_feature 1..822: note = Description of Artificial Sequence: Synthetic polynucleotide
  source 1..822: mol_type = other DNA
aattttatgctgactcagccccactctgtgtcggagtctccggggaagacggtaaccatctcctgcacccgcagcagtggcagcattgccagcaactatgtgcagtggtaccagcagcgcccgggcagtgcccccaccactgtgatctatgaggataaccaaagaccctctggggtccctgatcggttctctggctccatcgacagctcctccaactctgcctccctcaccatctctggactgaagactgaggacgaggctgactactactgtcagtcttatgatagcagcaattctgtggtattcggcggagggaccaagctgaccgtcctaggttctagaggtggtggtggtagcggcggcggcggctctggtggtggtggatccctcgagatggcccaggtccagctggtacagtctggcactgaggtgaagaagcctggggcctcagtgagggtcgcctgcaaggcttctggttacccctttaacaaatatgacatcaactgggtgcgacaggcccctggacaagggcttgagtggatgggaggcatcatccctatctttcgtacaacaaactacgcacagaagttccagggcagagtcacgattaccgcggacgaatccacgagcacagcctacatggagctgagcagcctgagatctgaggacacggccgtatattactgtgcgcgcgaatggttctactgggatatctggggtcaaggtactctggtgaccgtctcctcaactagtggccaggccggccagcaccatcaccatcaccatggcgcatacccgtacgacgttccggactacgcttct

SEQ ID NO: 748 - protein, 274 aa, synthetic construct
  REGION 1..274: note = Description of Artificial Sequence: Synthetic polypeptide
NFMLTQPHSVSESPGKTVTISCTRSSGSIASNYVQWYQQRPGSAPTTVIYEDNQRPSGVPDRFSGSIDSSSNSASLTISGLKTEDEADYYCQSYDSSNSVVFGGGTKLTVLGSRGGGGSGGGGSGGGGSLEMAQVQLVQSGTEVKKPGASVRVACKASGYPFNKYDINWVRQAPGQGLEWMGGIIPIFRTTNYAQKFQGRVTITADESTSTAYMELSSLRSEDTAVYYCAREWFYWDIWGQGTLVTVSSTSGQAGQHHHHHHGAYPYDVPDYAS

SEQ ID NO: 749 - DNA, 825 bp, synthetic construct
  misc_feature 1..825: note = Description of Artificial Sequence: Synthetic polynucleotide
  source 1..825: mol_type = other DNA
cagtctgtgttgactcagccaccctcagtgtccgtgtccccaggacagacagccagcatctcctgctctggaaataaattggggactaagtatgtttactggtatcagaagaggccaggccagtcccctgtgttggtcatgtatgaagataatcagcggccctcagggatcccggagcggttctctggctccaactctgggaacacagccactctgaccatcagagggacccagactgtggatgaggctgactattactgtcaggcgtgggactccgacactttcgtggtcttcggcggagggaccaaggtcaccgtcctaggttctagaggtggtggtggtagcggcggcggcggctctggtggtggtggatccctcgagatggccgaggtgcagctggtggagaccgggggaggcgtggtccagcctgggaggtccctgagactctcctgtgcagcctctggattcaccttcagtagttatggcatgcactgggtccgccaggctccaggcaaggggctggagtgggtggcagttatatcacatgatggaagtaataaatactacgcagactccgtgaagggccgattcaccatctccagagacaattccaaggacacgctgtatctgcaaatgaacagcctgagaggtgaggacacggccgtatattactgtgcgcgctctaaccagtggtctggttacttctctttcgattactggggtcaaggtactctggtgaccgtctcctcaactagtggccaggccggccagcaccatcaccatcaccatggcgcatacccgtacgacgttccggactacgcttct

SEQ ID NO: 750 - protein, 275 aa, synthetic construct
  REGION 1..275: note = Description of Artificial Sequence: Synthetic polypeptide
QSVLTQPPSVSVSPGQTASISCSGNKLGTKYVYWYQKRPGQSPVLVMYEDNQRPSGIPERFSGSNSGNTATLTIRGTQTVDEADYYCQAWDSDTFVVFGGGTKVTVLGSRGGGGSGGGGSGGGGSLEMAEVQLVETGGGVVQPGRSLRLSCAASGFTFSSYGMHWVRQAPGKGLEWVAVISHDGSNKYYADSVKGRFTISRDNSKDTLYLQMNSLRGEDTAVYYCARSNQWSGYFSFDYWGQGTLVTVSSTSGQAGQHHHHHHGAYPYDVPDYAS

SEQ ID NO: 751 - DNA, 819 bp, synthetic construct
  misc_feature 1..819: note = Description of Artificial Sequence: Synthetic polynucleotide
  source 1..819: mol_type = other DNA
tcctatgtgctgactcagccaccctcagtgtcagtggccccaggaaagacggccaggattacctgtgggggaaacaacattggaagtaaaagtgtgcactggtaccagcagaagccaggccaggcccctgtggtggtcatccattatgatagcgaccggccctcagggatccctgagcgattctctggctccaactctgggaacacggccaccctgaccatcagcagggtcgaagccggggatgaggccgactattactgtcaggtgtgggatagtagtagtgatcatccttatgtcttcggaactgggaccaaggtcaccgtcctaggttctagaggtggtggtggtagcggcggcggcggctctggtggtggtggatccctcgagatggccgaggtgcagctggtgcagtctggagctgaggtgaagaagcctggggcctcagtgaaggtctcctgcaaggcttctggttacacctttaccacctatggtatcagctgggtgcgacaggcccctggacaagggcttgagtggatgggatggatcaacacttacaatggtcacacaaactatgcacagaagctccagggcagagccacaatgaccgcagacacatccacgaacacagcctacatggagctgaggagcctgagatctgacgacactgccgtgtattactgtgcgcgcgttatctacggttctggtgattactggggtcaaggtactctggtgaccgtctcctcaactagtggccaggccggccagcaccatcaccatcaccatggcgcatacccgtacgacgttccggactacgcttct

SEQ ID NO: 752 - protein, 273 aa, synthetic construct
  REGION 1..273: note = Description of Artificial Sequence: Synthetic polypeptide
SYVLTQPPSVSVAPGKTARITCGGNNIGSKSVHWYQQKPGQAPVVVIHYDSDRPSGIPERFSGSNSGNTATLTISRVEAGDEADYYCQVWDSSSDHPYVFGTGTKVTVLGSRGGGGSGGGGSGGGGSLEMAEVQLVQSGAEVKKPGASVKVSCKASGYTFTTYGISWVRQAPGQGLEWMGWINTYNGHTNYAQKLQGRATMTADTSTNTAYMELRSLRSDDTAVYYCARVIYGSGDYWGQGTLVTVSSTSGQAGQHHHHHHGAYPYDVPDYAS

SEQ ID NO: 753 - DNA, 813 bp, synthetic construct
  misc_feature 1..813: note = Description of Artificial Sequence: Synthetic polynucleotide
  source 1..813: mol_type = other DNA
tcctatgtgctgactcagccactctcagtgtcagtggccccaggaaagacggccaggattacctgtgggggaaacaacattggaagtaaaactgtgcactggtaccagcagaagccaggccaggcccctgtgctggtcatctattatgatagcgaccggccctcagggatccctgagcgattctctggctccaactctgggaacacggccaccctgaccatcagcagggtcgaagccggggatgaggccgactattactgtcaggtgtgggatagtagtagtgatcatcgggtgttcggcggagggaccaagctgaccgtcctaggttctagaggtggtggtggtagcggcggcggcggctctggtggtggtggatccctcgagatggcccaggtgcagctgcaggagtcgggcccaggactggtgaagccttcggagaccctgtccctcacctgcaatgtctctggttactccatcagcagtggttacttttggggctggatccggcagcccccagggaaggggctggagtggattgggagtatctatcatagtaggagcacctactacaacccgtccctcaagagtcgagtcaccatatcagtagacacgtccaagaaccagttctccctgaagctgaactctgtgaccgccgcagacacggccgtgtattactgtgcgcgcggttacggttacttcgattactggggtcaaggtactctggtgaccgtctcctcaactagtggccaggccggccagcaccatcaccatcaccatggcgcatacccgtacgacgttccggactacgcttct

SEQ ID NO: 754 - protein, 271 aa, synthetic construct
  REGION 1..271: note = Description of Artificial Sequence: Synthetic polypeptide
SYVLTQPLSVSVAPGKTARITCGGNNIGSKTVHWYQQKPGQAPVLVIYYDSDRPSGIPERFSGSNSGNTATLTISRVEAGDEADYYCQVWDSSSDHRVFGGGTKLTVLGSRGGGGSGGGGSGGGGSLEMAQVQLQESGPGLVKPSETLSLTCNVSGYSISSGYFWGWIRQPPGKGLEWIGSIYHSRSTYYNPSLKSRVTISVDTSKNQFSLKLNSVTAADTAVYYCARGYGYFDYWGQGTLVTVSSTSGQAGQHHHHHHGAYPYDVPDYAS

SEQ ID NO: 755 - DNA, 834 bp, synthetic construct
  misc_feature 1..834: note = Description of Artificial Sequence: Synthetic polynucleotide
  source 1..834: mol_type = other DNA
caatctgccctgactcagcctgcctccgtgtctgggtctcctggacagtcgatcaccatctcctgcactggaaccagcagtgacgttggtggttataactatgtctcctggtaccaacaacacccaggcaaagcccccaaactcatgatttatgatgtcagtaatcggccctcaggggtttctaatcgcttctctggctccaagtctggcaacacggcctccctgaccatctctgggctccaggctgaggacgaggctgattattactgcagctcatatacaagcagcagcacttcgaaggtgttcggcggagggaccaagctgaccgtcctaggttctagaggtggtggtggtagcggcggcggcggctctggtggtggtggatccctcgagatggccgaggtgcagctggtggagtctgggggaggtgtggtacggcctggggggtccctgagactctcctgtgcagcctctggattcacctttggtgattatggcatgagctgggtccgccaagctccagggaaggggctggagtgggtctctggtattaattggaatggtggtagcacaggttatgcagactctgtgaagggccgattcaccatctccagagacaacgccaagaactccctgtatctgcaaatgaacagtctgagagccgaggacacggccgtatattactgtgcgcgctctaaatacaacttccatgtttactacgattactggggtcaaggtactctggtgaccgtctcctcaactagtggccaggccggccagcaccatcaccatcaccatggcgcatacccgtacgacgttccggactacgcttct

SEQ ID NO: 756 - protein, 278 aa, synthetic construct
  REGION 1..278: note = Description of Artificial Sequence: Synthetic polypeptide
QSALTQPASVSGSPGQSITISCTGTSSDVGGYNYVSWYQQHPGKAPKLMIYDVSNRPSGVSNRFSGSKSGNTASLTISGLQAEDEADYYCSSYTSSSTSKVFGGGTKLTVLGSRGGGGSGGGGSGGGGSLEMAEVQLVESGGGVVRPGGSLRLSCAASGFTFGDYGMSWVRQAPGKGLEWVSGINWNGGSTGYADSVKGRFTISRDNAKNSLYLQMNSLRAEDTAVYYCARSKYNFHVYYDYWGQGTLVTVSSTSGQAGQHHHHHHGAYPYDVPDYAS

SEQ ID NO: 757 - DNA, 831 bp, synthetic construct
  misc_feature 1..831: note = Description of Artificial Sequence: Synthetic polynucleotide
  source 1..831: mol_type = other DNA
cagtctgtgttgacgcagccaccctcagcgtctgggacccccgggcagacagtcaccatctcttgttctggaagcaactccaacatcggaagtaattatgtatactggtaccagcagctcccaggaacggcccccaaactcctcatctataggaataatcagcggccctcaggggtccctgaccgattctcaggctccaagtctggcacctcagcctccctggccatcagtgggctccgctccgaggatgaggctgattattactgtgcagcatgggatgacagcctgagtgcttatgtcttcggaactgggaccaaggtcaccgtcctaggttctagaggtggtggtggtagcggcggcggcggctctggtggtggtggatccctcgagatggcccaggtgcagctggtgcagtctggagctgaggtgaagaagcctggggcctcagtgaaggtctcctgcaaggcttctggttacacctttaccagctatggtatcagctgggtgcgacaggcccctggacaagggcttgagtggatgggatggatcagcgcttacaatggtaacacaaactatgcacagaagctccagggcagagtcaccatgaccacagacacatccacgagcacagcctacatggagctgaggagcctgagatctgacgacactgccgtgtattactgtgcgcgctcttctggtaacatggtttcttggaaagatatgtggggtcaaggtactctggtgaccgtctcctcaactagtggccaggccggccagcaccatcaccatcaccatggcgcatacccgtacgacgttccggactacgcttct

SEQ ID NO: 758 - protein, 277 aa, synthetic construct
  REGION 1..277: note = Description of Artificial Sequence: Synthetic polypeptide
QSVLTQPPSASGTPGQTVTISCSGSNSNIGSNYVYWYQQLPGTAPKLLIYRNNQRPSGVPDRFSGSKSGTSASLAISGLRSEDEADYYCAAWDDSLSAYVFGTGTKVTVLGSRGGGGSGGGGSGGGGSLEMAQVQLVQSGAEVKKPGASVKVSCKASGYTFTSYGISWVRQAPGQGLEWMGWISAYNGNTNYAQKLQGRVTMTTDTSTSTAYMELRSLRSDDTAVYYCARSSGNMVSWKDMWGQGTLVTVSSTSGQAGQHHHHHHGAYPYDVPDYAS

SEQ ID NO: 759 - DNA, 822 bp, synthetic construct
  misc_feature 1..822: note = Description of Artificial Sequence: Synthetic polynucleotide
  source 1..822: mol_type = other DNA
caatctgccctgactcagcctgcctccgtgtctgggtctcctggacagtcgatcaccatctcctgcactggaaccagcagtgacgttggtggttataactctgtctcctggtaccaacaacacccaggcaaagcccccagactcatgatttatgatgtcagtaatcggccctcaggggtttctaatcgcttctctggctccaagtctggcaacacggcctccctgaccatctctgggctccaggctgaggacgaggctgattattactgcagctcatatacaagcagcagcacccctttagtcttcggaactgggaccaaggtcaccgtcctaggttctagaggtggtggtggtagcggcggcggcggctctggtggtggtggatccctcgagatggcccaggtgcagctggtgcagtctggggctgaggtgaagaagcctggggcctcagtgaaggtctcctgcaaggcttctggttacacctttaccagctatggtatcagctgggtgcgacaggcccctggacaagggcttgagtggatgggatggatcagcgcttacaatggtaacacaaactatgcacagaagctccagggcagagtcaccatgaccacagacacatccacgagcacagcctacatggagctgaggagcctgagatctgacgacacggccgtgtattactgtgcgcgcggtgctgttgcttaccatgattggggtcaaggtactctggtgaccgtctcctcaactagtggccaggccggccagcaccatcaccatcaccatggcgcatacccgtacgacgttccggactacgcttct

SEQ ID NO: 760 - protein, 274 aa, synthetic construct
  REGION 1..274: note = Description of Artificial Sequence: Synthetic polypeptide
QSALTQPASVSGSPGQSITISCTGTSSDVGGYNSVSWYQQHPGKAPRLMIYDVSNRPSGVSNRFSGSKSGNTASLTISGLQAEDEADYYCSSYTSSSTPLVFGTGTKVTVLGSRGGGGSGGGGSGGGGSLEMAQVQLVQSGAEVKKPGASVKVSCKASGYTFTSYGISWVRQAPGQGLEWMGWISAYNGNTNYAQKLQGRVTMTTDTSTSTAYMELRSLRSDDTAVYYCARGAVAYHDWGQGTLVTVSSTSGQAGQHHHHHHGAYPYDVPDYAS

SEQ ID NO: 761 - DNA, 825 bp, synthetic construct
  misc_feature 1..825: note = Description of Artificial Sequence: Synthetic polynucleotide
  source 1..825: mol_type = other DNA
cagtctgtcgtgacgcagccgccctcagtgtctgcggccccaggacagagggtcaccatctcctgctctggaagcagctccaacatttcgatttatgatgtatcctggtatcagcagctcccaggaacagcccccaaactcctcatttatggcaataataagcgaccctcggggattgctgaccgattctctggctccacgtctggcacgtcagccaccctgggcatcaccggactccagactggggacgaggccgattattactgcggaacatgggatgacagtctgagtgggggggtgttcggcggagggaccaagctgaccgtcctaggttctagaggtggtggtggtagcggcggcggcggctctggtggtggtggatccctcgagatggcccagatgcagctggtgcaatctggggctgaggtgaagaagcctgggtcctcggtgaaggtctcctgcgaggcttctggaggcaccctcagcagctatgctatcaactgggtgcgacaggcccctggacaagggcttgagtggatgggagggatcatccctatgtttggtacagcacactacgcacagaagttccagggcagagtcacgattaccgcggacgaatccacgaaaacagcctacatggagctgagcagcctgagatctgaggacactgccgtgtattactgtgcgcgcggtgttcattacgcttctttcgatcattggggtcaaggtactctggtgaccgtctcctcaactagtggccaggccggccagcaccatcaccatcaccatggcgcatacccgtacgacgttccggactacgcttct

SEQ ID NO: 762 - protein, 275 aa, synthetic construct
  REGION 1..275: note = Description of Artificial Sequence: Synthetic polypeptide
QSVVTQPPSVSAAPGQRVTISCSGSSSNISIYDVSWYQQLPGTAPKLLIYGNNKRPSGIADRFSGSTSGTSATLGITGLQTGDEADYYCGTWDDSLSGGVFGGGTKLTVLGSRGGGGSGGGGSGGGGSLEMAQMQLVQSGAEVKKPGSSVKVSCEASGGTLSSYAINWVRQAPGQGLEWMGGIIPMFGTAHYAQKFQGRVTITADESTKTAYMELSSLRSEDTAVYYCARGVHYASFDHWGQGTLVTVSSTSGQAGQHHHHHHGAYPYDVPDYAS

SEQ ID NO: 763 - DNA, 822 bp, synthetic construct
  misc_feature 1..822: note = Description of Artificial Sequence: Synthetic polynucleotide
  source 1..822: mol_type = other DNA
cagtctgtgttgacgcagccgccctcagtgtctgcggccgcaggacagaaggtcaccatctcctgctctggaagcgactccaacattgggaataattatgtgtcctggtatcaacacctcccagggacagcccccaaactcctcatttatgacgttaaaaatcgaccctcagggattcctgaccggttctccggctccaagtctggctcgtcagccaccctaggcatcgccggactccagcctggggacgaggccgattattactgcggaacatgggacagtcggctggatgcctatgtcttcggaactgggaccaaggtcaccgtcctaggttctagaggtggtggtggtagcggcggcggcggctctggtggtggtggatccctcgagatggcccagatgcagctggtgcaatctggagctgaggtgaagaagcctggggcctcagtgaaggtctcctgcaagacttctggtttcccctttaatatctttggaatcacctgggtgcgacaggcccctggacaagggcttgagtggatgggatggatcagcggttacaacggtaacacagactacccacagaagttccagggcagagtcaccatgtccacagacacatccacgagtacagcctacatggagctgaggaacctgaaatctgacgacacggccgtgtattactgtgcgcgcggtgcttacggtggtatggatacttggggtcaaggtactctggtgaccgtctcctcaactagtggccaggccggccagcaccatcaccatcaccatggcgcatacccgtacgacgttccggactacgcttct

SEQ ID NO: 764 - protein, 274 aa, synthetic construct
  REGION 1..274: note = Description of Artificial Sequence: Synthetic polypeptide
QSVLTQPPSVSAAAGQKVTISCSGSDSNIGNNYVSWYQHLPGTAPKLLIYDVKNRPSGIPDRFSGSKSGSSATLGIAGLQPGDEADYYCGTWDSRLDAYVFGTGTKVTVLGSRGGGGSGGGGSGGGGSLEMAQMQLVQSGAEVKKPGASVKVSCKTSGFPFNIFGITWVRQAPGQGLEWMGWISGYNGNTDYPQKFQGRVTMSTDTSTSTAYMELRNLKSDDTAVYYCARGAYGGMDTWGQGTLVTVSSTSGQAGQHHHHHHGAYPYDVPDYAS

SEQ ID NO: 765 - DNA, 828 bp, synthetic construct
  misc_feature 1..828: note = Description of Artificial Sequence: Synthetic polynucleotide
  source 1..828: mol_type = other DNA
cagtctgtcgtgacgcagccgccctcagtgtctggggccccagggcagagggtcaccatctcctgcactgggagcacctccaacatcggggcaggttatgatgtacactggtatcagcagcttccaggaacagcccccaaactcctcatctatactaacaactttcggccctcaggggtccctgaccgattctctgcctccaagtctggcacttcagcttccctggccatcactggtctccaggctgaggatgaggctgattattactgcggaacatgggatagcagcctgagtgccgttgtgttcggcggagggaccaagctgaccgtcctaggttctagaggtggtggtggtagcggcggcggcggctctggtggtggtggatccctcgagatggccgaggtgcagctggtggagtctggaactgaggtgaagaagcctggggcctcagtgaaagtctcctgcaaggcttctggttacatgtttaccagttatggtctcaactgggtgcgacaggcccctggacaagggcttgagtggatgggatggatcagcgctaacaatggtaagacaaattatgctaagaaattccaggacagagtcaccatgaccagagacacttccacgagcacaggctacatggaactgaggagcctgagatctgacgacacggccgtatattactgtgcgcgccatatcggtggttcttacttcgatcgttggggtcaaggtactctggtgaccgtctcctcaactagtggccaggccggccagcaccatcaccatcaccatggcgcatacccgtacgacgttccggactacgcttct

SEQ ID NO: 766 - protein, 276 aa, synthetic construct
  REGION 1..276: note = Description of Artificial Sequence: Synthetic polypeptide
QSVVTQPPSVSGAPGQRVTISCTGSTSNIGAGYDVHWYQQLPGTAPKLLIYTNNFRPSGVPDRFSASKSGTSASLAITGLQAEDEADYYCGTWDSSLSAVVFGGGTKLTVLGSRGGGGSGGGGSGGGGSLEMAEVQLVESGTEVKKPGASVKVSCKASGYMFTSYGLNWVRQAPGQGLEWMGWISANNGKTNYAKKFQDRVTMTRDTSTSTGYMELRSLRSDDTAVYYCARHIGGSYFDRWGQGTLVTVSSTSGQAGQHHHHHHGAYPYDVPDYAS

SEQ ID NO: 767 - DNA, 822 bp, synthetic construct
  misc_feature 1..822: note = Description of Artificial Sequence: Synthetic polynucleotide
  source 1..822: mol_type = other DNA
tcctatgtgctgactcagccaccctcagtgtcagtggccccaggaaagacggccaggattacctgtgggggaaacaacattggaagtaaaagtgtgcactggtaccagcagaagccaggccaggcccctgtgctggtcatctattatgatagcgaccggccctcagggatccctgagcgattctctggctccaactctgggaacacggccaccctgaccatcagcagggtcgaagccggggatgaggccgactattactgtcaggtgtgggatagtagtagtgatcattatgtcttcggaactgggaccaaggtcaccgtcctaggttctagaggtggtggtggtagcggcggcggcggctctggtggtggtggatccctcgagatggccgaggtgcagctggtggagactgggggaggcttggtacagcctggggggtccctgagactctcctgtgcagcctctggattcacctttagcagctatgccatgagctgggtccgccaggctccagggaaggggctggagtgggtctcagctattagtggtagtgatggtagcacatactacgcagactccgtgaagggccggttcaccatctccagagacaattccaagaacacgctgtatctgcaaatgaacagcctgagagacgaggacacggccgtatattactgtgcgcgctctcatgaagctaacctggttggtgattggtggggtcaaggtactctggtgaccgtctcctcaactagtggccaggccggccagcaccatcaccatcaccatggcgcatacccgtacgacgttccggactacgcttct

SEQ ID NO: 768 - protein, 274 aa, synthetic construct
  REGION 1..274: note = Description of Artificial Sequence: Synthetic polypeptide
SYVLTQPPSVSVAPGKTARITCGGNNIGSKSVHWYQQKPGQAPVLVIYYDSDRPSGIPERFSGSNSGNTATLTISRVEAGDEADYYCQVWDSSSDHYVFGTGTKVTVLGSRGGGGSGGGGSGGGGSLEMAEVQLVETGGGLVQPGGSLRLSCAASGFTFSSYAMSWVRQAPGKGLEWVSAISGSDGSTYYADSVKGRFTISRDNSKNTLYLQMNSLRDEDTAVYYCARSHEANLVGDWWGQGTLVTVSSTSGQAGQHHHHHHGAYPYDVPDYAS

SEQ ID NO: 769 - DNA, 816 bp, synthetic construct
  misc_feature 1..816: note = Description of Artificial Sequence: Synthetic polynucleotide
  source 1..816: mol_type = other DNA
cagtctgtggtgactcagccaccctcagtgtcagtggccccaggaaagacggccaggattacctgtgggggaaacaacattggaagtaaaagtgtgcactggtaccagcagaagccaggccaggcccctgtgctggtcatctattatgatagcgaccggccctcagggatccctgagcgattctctggctccaactctgggaacacggccaccctgaccatcagcagggtcgaagccggggatgaggccgactattactgtcaggtgtgggatagtagtagtgatgtggtattcggcggagggaccaagctgaccgtcctaggttctagaggtggtggtggtagcggcggcggcggctctggtggtggtggatccctcgagatggccgaggtccagctggtacagtctggagctgaggtgaagaagcctggggcctcagtgaaggtctcctgcaaggcttctggttacacctttaccagctacggtatcagctgggtgcgacaggcccctggacaagggcttgagtggatgggatggatcagcgcttacaatggtaacacaaactatgcacagaagctccagggcagagtcaccatgaccacagacacatccacgagcacagcctacatggagctgaggagcctgagatctgacgacacggccgtgtattactgtgcgcgctggggtggtttcggtgctgttgatcattggggtcaaggtactctggtgaccgtctcctcaactagtggccaggccggccagcaccatcaccatcaccatggcgcatacccgtacgacgttccggactacgcttct

SEQ ID NO: 770 - protein, 272 aa, synthetic construct
  REGION 1..272: note = Description of Artificial Sequence: Synthetic polypeptide
QSVVTQPPSVSVAPGKTARITCGGNNIGSKSVHWYQQKPGQAPVLVIYYDSDRPSGIPERFSGSNSGNTATLTISRVEAGDEADYYCQVWDSSSDVVFGGGTKLTVLGSRGGGGSGGGGSGGGGSLEMAEVQLVQSGAEVKKPGASVKVSCKASGYTFTSYGISWVRQAPGQGLEWMGWISAYNGNTNYAQKLQGRVTMTTDTSTSTAYMELRSLRSDDTAVYYCARWGGFGAVDHWGQGTLVTVSSTSGQAGQHHHHHHGAYPYDVPDYAS

SEQ ID NO: 771 - DNA, 810 bp, synthetic construct
  misc_feature 1..810: note = Description of Artificial Sequence: Synthetic polynucleotide
  source 1..810: mol_type = other DNA
tcttctgagctgactcaggaccctgctgtgtctgtggccttgggacagacagtcaagatcacgtgccaaggagacagcctcacagactaccatgcaacctggtaccagcagaagccaggacaggcccctgtcgctgtcatctatgctacaaacaaccggcccactgggatcccagaccgattctctggttccagttccggaaacacagcttctttgaccatcactggggctcaggcggaagatgaggctgactattactgtaattcccgggacagcggcacggacgaagtgttattcggcggagggaccaagctgaccgtcctaggttctagaggtggtggtggtagcggcggcggcggctctggtggtggtggatccctcgagatggccgaggtgcagctggtggagactgggggaggcctggtcaagcctggggggtccctgagactctcctgtgcagcctctggattcaccttcagtagctatagcatgaactgggtccgccaggctccagggaaggggctggagtgggtctcatccattagtagtagtagtagttacatatactacgcagactcagtgaagggccgattcaccatctccagagacaacgccaagaactcactgtatctgcaaatgaacagcctgagagccgaggacacggccgtgtattactgtgcgcgcggtcagggttacgattactggggtcaaggtactctggtgaccgtctcctcaactagtggccaggccggccagcaccatcaccatcaccatggcgcatacccgtacgacgttccggactacgcttct

SEQ ID NO: 772 - protein, 270 aa, synthetic construct
  REGION 1..270: note = Description of Artificial Sequence: Synthetic polypeptide
SSELTQDPAVSVALGQTVKITCQGDSLTDYHATWYQQKPGQAPVAVIYATNNRPTGIPDRFSGSSSGNTASLTITGAQAEDEADYYCNSRDSGTDEVLFGGGTKLTVLGSRGGGGSGGGGSGGGGSLEMAEVQLVETGGGLVKPGGSLRLSCAASGFTFSSYSMNWVRQAPGKGLEWVSSISSSSSYIYYADSVKGRFTISRDNAKNSLYLQMNSLRAEDTAVYYCARGQGYDYWGQGTLVTVSSTSGQAGQHHHHHHGAYPYDVPDYAS

SEQ ID NO: 773 - DNA, 810 bp, synthetic construct
  misc_feature 1..810: note = Description of Artificial Sequence: Synthetic polynucleotide
  source 1..810: mol_type = other DNA
tcctatgtgctgactcagccaccctcggtgtcagtggccccaggaaagacggccaggattacctgtgggggaaacaacattggaagtaaaagtgtgcactggtaccagcagaagccaggccaggcccctgtgctggtcgtctatgatgatagcgaccggccctcagggatccctgagcgattctctggctccaactctgggaacacggccaccctgagcatcagcagggtcgaagccggggatgaggccgactattactgtcaggtgtgggatagtagtagtgatcatactgtcttcggaactgggaccaaggtcaccgtcctaggttctagaggtggtggtggtagcggcggcggcggctctggtggtggtggatccctcgagatggcccaggtgcagctacagcagtggggcgcaggactgttgaagccttcggagaccctgtccctcacctgcgctgtctatggtgggtccttcagtggttactactggagctggatccgccagcccccagggaaggggctggagtggattggggaaatcaatcatagtggaagcaccaactacaacccgtccctcaagagtcgagtcaccatatcagtagacacgtccaagaaccagttctccctgaagctgagctctgtgaccgccgcggacacggccgtgtattactgtgcgcgctactacccgggtatggatatgtggggtcaaggtactctggtgaccgtctcctcaactagtggccaggccggccagcaccatcaccatcaccatggcgcatacccgtacgacgttccggactacgcttct

SEQ ID NO: 774 - protein, 270 aa, synthetic construct
  REGION 1..270: note = Description of Artificial Sequence: Synthetic polypeptide
SYVLTQPPSVSVAPGKTARITCGGNNIGSKSVHWYQQKPGQAPVLVVYDDSDRPSGIPERFSGSNSGNTATLSISRVEAGDEADYYCQVWDSSSDHTVFGTGTKVTVLGSRGGGGSGGGGSGGGGSLEMAQVQLQQWGAGLLKPSETLSLTCAVYGGSFSGYYWSWIRQPPGKGLEWIGEINHSGSTNYNPSLKSRVTISVDTSKNQFSLKLSSVTAADTAVYYCARYYPGMDMWGQGTLVTVSSTSGQAGQHHHHHHGAYPYDVPDYAS

SEQ ID NO: 775 - DNA, 816 bp, synthetic construct
  misc_feature 1..816: note = Description of Artificial Sequence: Synthetic polynucleotide
  source 1..816: mol_type = other DNA
caggctgtgctgactcagccgccctcaacgtctgggacccccgggcagagggtcaccatctcttgttctggaagcagctccaacatcgggagaaatggtgtaaactggtaccagcagctcccaggagcggcccccaaagtcctcatctataatgataatcagcgaccctcaggggtccctgaccgagtctctggctcccagtctggctcctcaggcaccctggccatcgatgggcttcggtctgaggatgaggctgattattactgtgcggcatgggatgacagcctgcatggtgtggtattcggcggagggaccaagctgaccgtcctaggttctagaggtggtggtggtagcggcggcggcggctctggtggtggtggatccctcgagatggcccaggtccagctggtacagtctggggctgaggtgaagaagcctggggcctcagtgaaggtctcctgcaaggtttccggatacaccctcaatgaattatccatgcactgggtgcgacaggctcctggaaaagggcttgagtggatgggaggttttgatcctgaagatggtgaaacaatctacgcacagaagttccagggcagagtcaccatgaccgaggacacatctacagacacagcctacatggagctgagcagcctgagatctgaggacactgccgtgtattactgtgcgcgcggtggttacggtgattcttggggtcaaggtactctggtgaccgtctcctcaactagtggccaggccggccagcaccatcaccatcaccatggcgcatacccgtacgacgttccggactacgcttct

SEQ ID NO: 776 - protein, 272 aa, synthetic construct
  REGION 1..272: note = Description of Artificial Sequence: Synthetic polypeptide
QAVLTQPPSTSGTPGQRVTISCSGSSSNIGRNGVNWYQQLPGAAPKVLIYNDNQRPSGVPDRVSGSQSGSSGTLAIDGLRSEDEADYYCAAWDDSLHGVVFGGGTKLTVLGSRGGGGSGGGGSGGGGSLEMAQVQLVQSGAEVKKPGASVKVSCKVSGYTLNELSMHWVRQAPGKGLEWMGGFDPEDGETIYAQKFQGRVTMTEDTSTDTAYMELSSLRSEDTAVYYCARGGYGDSWGQGTLVTVSSTSGQAGQHHHHHHGAYPYDVPDYAS

SEQ ID NO: 777 - DNA, 870 bp, synthetic construct
  misc_feature 1..870: note = Description of Artificial Sequence: Synthetic polynucleotide
  source 1..870: mol_type = other DNA
aattttatgctgactcagccccactctgtgtcggagtctccggggaagacggtaaccatctcctgcacccgcagcagtggcagcattgccagcaactatgtgcagtggtaccagcagcgcccgggcagtgcccccaccactgtgatctatgaggataaccaaagaccctctggggtccctgatcggttctctggctccatcgacagctcctccaactctgcctccctcaccatctctggactgaagactgaggacgaggctgactactactgtcagtcttatgatagcagcaattcttgggtgttcggcggagggaccaagctgaccgtcctaggttctagaggtggtggtggtagcggcggcggcggctctggtggtggtggatccctcgagatggcccaggtgcagctggtgcaatctggggctgaggtgaagaggcctgggtcctcggtgaaggtctcctgcacggcttctggaggcaccttcagcagcgatgctatcagctgggtgcgacaggcccctggacaagggcttgagtggatgggaggaatcatccctatgtttggtacagcaaactacgcacagaagttccagggcagagtcacgattaccgcggacgaatccacgagcacagcctacatggagctgagcagcctgagatctgaggacacggccgtgtattactgtgcgcgcgaaggttactactacccgtctgcttacctgggttctgttctgaacgacatctcttctgtttacgatgaatggggtcaaggtactctggtgaccgtctcctcaactagtggccaggccggccagcaccatcaccatcaccatggcgcatacccgtacgacgttccggactacgcttct

SEQ ID NO: 778 - protein, 290 aa, synthetic construct
  REGION 1..290: note = Description of Artificial Sequence: Synthetic polypeptide
NFMLTQPHSVSESPGKTVTISCTRSSGSIASNYVQWYQQRPGSAPTTVIYEDNQRPSGVPDRFSGSIDSSSNSASLTISGLKTEDEADYYCQSYDSSNSWVFGGGTKLTVLGSRGGGGSGGGGSGGGGSLEMAQVQLVQSGAEVKRPGSSVKVSCTASGGTFSSDAISWVRQAPGQGLEWMGGIIPMFGTANYAQKFQGRVTITADESTSTAYMELSSLRSEDTAVYYCAREGYYYPSAYLGSVLNDISSVYDEWGQGTLVTVSSTSGQAGQHHHHHHGAYPYDVPDYAS

SEQ ID NO: 779 - DNA, 822 bp, synthetic construct
  misc_feature 1..822: note = Description of Artificial Sequence: Synthetic polynucleotide
  source 1..822: mol_type = other DNA
cagtctgtcgtgacgcagccgccctcagtgtctgcggccccaggacagaaggtcaccatctcctgctctggaagcacctccaacattggaaataatgatgtatcctggtaccagcagctcccaggaacagcccccaaactcctcatttatgacaataataagcgaccctcagggattcctgaccgattctctggctccaagtctggcacgtcagccaccctgggcatcaccggactccagactggggacgaggccgattattactgcggaacatgggatagcagcgtgagtgcttcttgggtcttcggcagagggaccaagctgaccgtcctaggttctagaggtggtggtggtagcggcggcggcggctctggtggtggtggatccctcgagatggcccaggtgcagctggtgcagtctggagctgaggtgaagaagcctggggcctcagtgaaggtctcctgcaaggcttctggttacacctttaccagctatggtatcagctgggtgcgacaggcccctggacaagggcttgagtggatgggatggatcagcgcttacaatggtaacacaaactatccacagaagctccagggcagagtcaccatgaccacagacccatccacgagcacagcctacatggagctgaggagcctgagatctgacgacacggccgtgtattactgtgcgcgctctatgacttctttcgattactggggtcaaggtactctggtgaccgtctcctcaactagtggccaggccggccagcaccatcaccatcaccatggcgcatacccgtacgacgttccggactacgcttct

SEQ ID NO: 780 - protein, 274 aa, synthetic construct
  REGION 1..274: note = Description of Artificial Sequence: Synthetic polypeptide
QSVVTQPPSVSAAPGQKVTISCSGSTSNIGNNDVSWYQQLPGTAPKLLIYDNNKRPSGIPDRFSGSKSGTSATLGITGLQTGDEADYYCGTWDSSVSASWVFGRGTKLTVLGSRGGGGSGGGGSGGGGSLEMAQVQLVQSGAEVKKPGASVKVSCKASGYTFTSYGISWVRQAPGQGLEWMGWISAYNGNTNYPQKLQGRVTMTTDPSTSTAYMELRSLRSDDTAVYYCARSMTSFDYWGQGTLVTVSSTSGQAGQHHHHHHGAYPYDVPDYAS

SEQ ID NO: 781 - DNA, 822 bp, synthetic construct
  misc_feature 1..822: note = Description of Artificial Sequence: Synthetic polynucleotide
  source 1..822: mol_type = other DNA
cagtctgtgttgacgcagccgccctcagtgtctgcggccccaggacagaaggtcaccatctcctgctctggaagcaactccaacattgggaataattatgtatcctggtatcagcaactcccagggacagcccccaaactcctcatttatgacaataataagcgaccctcagggattcctgaccgattctctggctccaggtctggcacgtcagccaccctgggcatcaccggactccagactggggacgaggccgattattactgcggaacatggaataccactgtgactcctggctatgtcttcggaactgggaccaaggtcaccgtcctaggttctagaggtggtggtggtagcggcggcggcggctctggtggtggtggatccctcgagatggccgaagtgcagctggtgcagtctggagctgaggtgaagaagcctggggcctcagtgaaggtctcctgcaaggcttctggttacacctttaccagctatggtatcagctgggtgcgacaggcccctggacaagggcttgagtggatgggatggatcagcgcttacaatggtaacacaaactatgcacagaagctccagggcagagtcaccatgaccacagacacatccacgagcacagcctacatggagctgaggagcctgagatctgacgacaccgccatgtattactgtgcgcgctctgtttacgacctggatacttggggtcaaggtactctggtgaccgtctcctcaactagtggccaggccggccagcaccatcaccatcaccatggcgcatacccgtacgacgttccggactacgcttct

SEQ ID NO: 782 - protein, 274 aa, synthetic construct
  REGION 1..274: note = Description of Artificial Sequence: Synthetic polypeptide
QSVLTQPPSVSAAPGQKVTISCSGSNSNIGNNYVSWYQQLPGTAPKLLIYDNNKRPSGIPDRFSGSRSGTSATLGITGLQTGDEADYYCGTWNTTVTPGYVFGTGTKVTVLGSRGGGGSGGGGSGGGGSLEMAEVQLVQSGAEVKKPGASVKVSCKASGYTFTSYGISWVRQAPGQGLEWMGWISAYNGNTNYAQKLQGRVTMTTDTSTSTAYMELRSLRSDDTAMYYCARSVYDLDTWGQGTLVTVSSTSGQAGQHHHHHHGAYPYDVPDYAS

SEQ ID NO: 783 - DNA, 831 bp, synthetic construct
  misc_feature 1..831: note = Description of Artificial Sequence: Synthetic polynucleotide
  source 1..831: mol_type = other DNA
cagtctgtcgtgacgcagccgccctcagtgtctgcggccccaggacagaaggtcaccatctcctgctctggaagcagctccaacattgggaataattatgtatcctggtaccagcagctcccaggaacagcccccaaactcctcatttatgacaataataagcgaccctcagggattcctgaccgattctctggctccaagtctggcacgtcagccaccctgggcatcaccggactccagactggggacgaggccgattattactgcggaacatgggatagcagcctgggggccccttatgtcttcggaactgggaccaaggtcaccgtcctaggttctagaggtggtggtggtagcggcggcggcggctctggtggtggtggatccctcgagatggccgaggtgcagctggtgcagtcttggggaggctcggaacagcctggcaggtccctgagactctcctgtgcagcctctggattcacctttgatgattatgccatgcactgggtccggcaagctccagggaagggcctggagtgggtctcaggtattagttggaatagcggtagcataggctatgcggactctgtgaagggccgattcaccatctccagagacaacgccaagaattccctgtatctgcaaatgaacagtctgagagctgaggacaccgccatgtattactgtgcgcgctaccgtcaggttggttctgcttacgattcttggggtcaaggtactctggtgaccgtctcctcaactagtggccaggccggccagcaccatcaccatcaccatggcgcatacccgtacgacgttccggactacgcttct

SEQ ID NO: 784 - protein, 277 aa, synthetic construct
  REGION 1..277: note = Description of Artificial Sequence: Synthetic polypeptide
QSVVTQPPSVSAAPGQKVTISCSGSSSNIGNNYVSWYQQLPGTAPKLLIYDNNKRPSGIPDRFSGSKSGTSATLGITGLQTGDEADYYCGTWDSSLGAPYVFGTGTKVTVLGSRGGGGSGGGGSGGGGSLEMAEVQLVQSWGGSEQPGRSLRLSCAASGFTFDDYAMHWVRQAPGKGLEWVSGISWNSGSIGYADSVKGRFTISRDNAKNSLYLQMNSLRAEDTAMYYCARYRQVGSAYDSWGQGTLVTVSSTSGQAGQHHHHHHGAYPYDVPDYAS

SEQ ID NO: 785 - DNA, 822 bp, synthetic construct
  misc_feature 1..822: note = Description of Artificial Sequence: Synthetic polynucleotide
  source 1..822: mol_type = other DNA
ctgcctgtgctgactcagccaccctcggtgtcagtggccccaggaaagacggccaggattacctgtgggggaaacaacattggaagtaaaagtgtgcactggtatcagcagaagccaggccaggcccctgtgctggtcgtctatgctgatagcgaccggccctcagggatccctgagcgattctctggctccaactctgggaacacggccaccctgaccatcagcagggtcgaagccggggatgaggccgactattactgtcaggtgtgggatagtagtagttatcataattatgtcttcggaactgggaccaaggtcaccgtcctaggttctagaggtggtggtggtagcggcggcggcggctctggtggtggtggatccctcgagatggccgaggtgcagctggtgcagtctggagctgaggtgaagaagcctggggcctcagtgaaggtctcctgcaaggcttctggttacacctttaccagctatggtatcagctgggtgcgacaggcccctggacaagggcttgagtggatgggatggatcagcgcttacaatggtaacacaaactatgcacagaagctccagggcagagtcaccatgaccacagacacatccacgagcacagcctacatggagctgagcagcctgagatctgaggacaccgccatgtattactgtgcgcgctactggggtttcggtgtttctgatcgttggggtcaaggtactctggtgaccgtctcctcaactagtggccaggccggccagcaccatcaccatcaccatggcgcatacccgtacgacgttccggactacgcttct

SEQ ID NO: 786 - protein, 274 aa, synthetic construct
  REGION 1..274: note = Description of Artificial Sequence: Synthetic polypeptide
LPVLTQPPSVSVAPGKTARITCGGNNIGSKSVHWYQQKPGQAPVLVVYADSDRPSGIPERFSGSNSGNTATLTISRVEAGDEADYYCQVWDSSSYHNYVFGTGTKVTVLGSRGGGGSGGGGSGGGGSLEMAEVQLVQSGAEVKKPGASVKVSCKASGYTFTSYGISWVRQAPGQGLEWMGWISAYNGNTNYAQKLQGRVTMTTDTSTSTAYMELSSLRSEDTAMYYCARYWGFGVSDRWGQGTLVTVSSTSGQAGQHHHHHHGAYPYDVPDYAS

SEQ ID NO: 787 - DNA, 825 bp, synthetic construct
  misc_feature 1..825: note = Description of Artificial Sequence: Synthetic polynucleotide
  source 1..825: mol_type = other DNA
aattttatgctgactcagccccactctgtgtcggagtctccggggaagacggtaaccatctcctgcaccggcagcagtggcagcattgccagcaactatgtgcagtggtaccagcagcgcccgggcagtgcccccaccactgtgatctatgaggataaccaaagaccctctggggtccccgatcggttctctggctccatcgacagctcctccaactctgcctccctcaccatctctggactgaagactgaggacgaggctgactactactgtcagtcttatgacagcagcaatctttgggtgttcggcggagggaccaagctgaccgtcctaggttctagaggtggtggtggtagcggcggcggcggctctggtggtggtggatccctcgagatggcccagatgcagctggtgcagtctggggctgaggtgaagaagcctgggtcctcggtgaaggtctcctgcaaggcttctggaggcaccttcagcagctatgctatcagctgggtgcgacaggcccctggacaagggcttgagtggatgggagggatcatccctatctttggtacagcaaactacgcacagaagttccagggcagagtcacgattaccgcggacgaatccacgagcacagcctacatggagctgagcagcctgagatctgaggacactgccgtgtattactgtgcgcgctacaactactactactacgattcttggggtcaaggtactctggtgaccgtctcctcaactagtggccaggccggccagcaccatcaccatcaccatggcgcatacccgtacgacgttccggactacgcttct

SEQ ID NO: 788 - protein, 275 aa, synthetic construct
  REGION 1..275: note = Description of Artificial Sequence: Synthetic polypeptide
NFMLTQPHSVSESPGKTVTISCTGSSGSIASNYVQWYQQRPGSAPTTVIYEDNQRPSGVPDRFSGSIDSSSNSASLTISGLKTEDEADYYCQSYDSSNLWVFGGGTKLTVLGSRGGGGSGGGGSGGGGSLEMAQMQLVQSGAEVKKPGSSVKVSCKASGGTFSSYAISWVRQAPGQGLEWMGGIIPIFGTANYAQKFQGRVTITADESTSTAYMELSSLRSEDTAVYYCARYNYYYYDSWGQGTLVTVSSTSGQAGQHHHHHHGAYPYDVPDYAS

SEQ ID NO: 789 - DNA, 816 bp, synthetic construct
  misc_feature 1..816: note = Description of Artificial Sequence: Synthetic polynucleotide
  source 1..816: mol_type = other DNA
gacatccagatgacccagtctccatcctccctgtctgcatctgtaggagacagagtcaccatcacttgccgggcaagtcagagcattagcagctatttaaattggtatcagcagaaaccagggaaagcccctaagctcctgatctatgctgcatccagtttgcaaagtggggtcccatcaaggttcagtggcagtggatctgggacagatttcactctcaccatcagcagtctgcaacctgaagattttgcaacttactactgtcaacagagttacagtaccccattcactttcggccctgggaccaaagtggatatcaaacgttctagaggtggtggtggtagcggcggcggcggctctggtggtggtggatccctcgagatggccgaggtgcagctggtgcagtctggggctgaggtgaagaagcctgggtcctcggtgaaggtctcctgcaaggcttctggaggcaccttcagcagctatgctatcagctgggtgcgacaggcccctggacaagggcttgagtggatgggagggatcatccctatctttggtacagcaaactacgcacagaagttccagggcagagtcacgattaccgcggacgaatccacgagcacagcctacatggagctgagcagcctgagatctgaggacaccgccatgtattactgtgcgcgctactggggttacgactcttacgatgaatggggtcaaggtactctggtgaccgtctcctcaactagtggccaggccggccagcaccatcaccatcaccatggcgcatacccgtacgacgttccggactacgcttct

SEQ ID NO: 790 - protein, 272 aa, synthetic construct
  REGION 1..272: note = Description of Artificial Sequence: Synthetic polypeptide
DIQMTQSPSSLSASVGDRVTITCRASQSISSYLNWYQQKPGKAPKLLIYAASSLQSGVPSRFSGSGSGTDFTLTISSLQPEDFATYYCQQSYSTPFTFGPGTKVDIKRSRGGGGSGGGGSGGGGSLEMAEVQLVQSGAEVKKPGSSVKVSCKASGGTFSSYAISWVRQAPGQGLEWMGGIIPIFGTANYAQKFQGRVTITADESTSTAYMELSSLRSEDTAMYYCARYWGYDSYDEWGQGTLVTVSSTSGQAGQHHHHHHGAYPYDVPDYAS

SEQ ID NO: 791 - DNA, 822 bp, synthetic construct
  misc_feature 1..822: note = Description of Artificial Sequence: Synthetic polynucleotide
  source 1..822: mol_type = other DNA
aattttatgctgactcagccccactctgtgtcggagtctccggggaagacggtaaccatctcctgcaccggcagcagtggcagcattgccagcaactatgtgcagtggtaccagcagcgcccgggcagtgcccccaccactgtgatctatgaggataaccaaagaccctctggggtccctgatcggttctctggctccatcgacagctcctccaactctgcctccctcaccatctctggactgaagactgaggacgaggctgactactactgtcagtcttatgatagcagcaattgggtgttcggcggagggaccaagctgaccgtcctaggttctagaggtggtggtggtagcggcggcggcggctctggtggtggtggatccctcgagatggccgaggtccagctggtgcagtctggggctgaggtgaagaagcctgggtcctcggtgaaggtctcctgcaaggcttctggaggcaccttcagcagctatgctatcagctgggtgcgacaggcccctggacaagggcttgagtggatgggagggatcatccctatctttggtacagcaaactacgcacagaagttccagggcagagtcacgattaccgcggacgaatccacgagcacagcctacatggagctgagcagcctgagatctgaggacacggccgtgtattactgtgcgcgcaacaaccattactacaacgattactggggtcaaggtactctggtgaccgtctcctcaactagtggccaggccggccagcaccatcaccatcaccatggcgcatacccgtacgacgttccggactacgcttct

SEQ ID NO: 792 - protein, 274 aa, synthetic construct
  REGION 1..274: note = Description of Artificial Sequence: Synthetic polypeptide
NFMLTQPHSVSESPGKTVTISCTGSSGSIASNYVQWYQQRPGSAPTTVIYEDNQRPSGVPDRFSGSIDSSSNSASLTISGLKTEDEADYYCQSYDSSNWVFGGGTKLTVLGSRGGGGSGGGGSGGGGSLEMAEVQLVQSGAEVKKPGSSVKVSCKASGGTFSSYAISWVRQAPGQGLEWMGGIIPIFGTANYAQKFQGRVTITADESTSTAYMELSSLRSEDTAVYYCARNNHYYNDYWGQGTLVTVSSTSGQAGQHHHHHHGAYPYDVPDYAS

SEQ ID NO: 793 - DNA, 852 bp, synthetic construct
  misc_feature 1..852: note = Description of Artificial Sequence: Synthetic polynucleotide
  source 1..852: mol_type = other DNA
cagtctgtgttgacgcagccgccctcagtgtctggggccccagggcagggggtcaccatcccctgcactgggagcagctccaacatcggggcaggttatgatgtacactggtaccagcagcttccagggacagcccccaaactcctcatctatggtaacaacaatcggccctcaggggtccctgaccgcttctctggctccaggtctggctcctcagcctccctggccatcactgggctccaggctgaggatgaggctgattattactgccagtcctatgacagcagcctgagtgatgtggtattcggcggagggaccaaggtcaccgtcctaggttctagaggtggtggtggtagcggcggcggcggctctggtggtggtggatccctcgagatggccgaggtccagctggtgcagtctggggctgaggtgaagaagcctggggctacagtgaaaatctcctgcaaggtttctggatacaccttcaccgactactacatgcactgggtgcaacaggcccctggaaaagggcttgagtggatgggacttgttgatcctgaagatggtgaaacaatatacgcagagaagttccagggcagagtcaccataaccgcggacacgtctacagacacagcctacatggagctgagcagcctgagatctgaggacacggccgtgtattactgtgcgcgctactggtcttactctttcgactacctgtacatgccggaaggtaacgattggtggggtcaaggtactctggtgaccgtctcctcaactagtggccaggccggccagcaccatcaccatcaccatggcgcatacccgtacgacgttccggactacgcttct

SEQ ID NO: 794 - protein, 284 aa, synthetic construct
  REGION 1..284: note = Description of Artificial Sequence: Synthetic polypeptide
QSVLTQPPSVSGAPGQGVTIPCTGSSSNIGAGYDVHWYQQLPGTAPKLLIYGNNNRPSGVPDRFSGSRSGSSASLAITGLQAEDEADYYCQSYDSSLSDVVFGGGTKVTVLGSRGGGGSGGGGSGGGGSLEMAEVQLVQSGAEVKKPGATVKISCKVSGYTFTDYYMHWVQQAPGKGLEWMGLVDPEDGETIYAEKFQGRVTITADTSTDTAYMELSSLRSEDTAVYYCARYWSYSFDYLYMPEGNDWWGQGTLVTVSSTSGQAGQHHHHHHGAYPYDVPDYAS

SEQ ID NO: 795 - DNA, 828 bp, synthetic construct
  misc_feature 1..828: note = Description of Artificial Sequence: Synthetic polynucleotide
  source 1..828: mol_type = other DNA
cagtctgtgttgactcagccacccgcagcgtctgggacccccggacagagagtcaccatctcttgttctgggggcgtctccaacatcgggagtggtgctctaaattggtaccagcaactcccaggaacggcccccaaactcctcatctatagttacaatcagcggccctcaggggtctctgaccgattctctggctccaggtctgccacctcagcctccctggccatcagtgggctccagtctgaggatgaggctgattattactgtgcaacctgggatgatagtgtgaatggttgggtgttcggcggagggaccaagctgaccgtcctaggttctagaggtggtggtggtagcggcggcggcggctctggtggtggtggatccctcgagatggcccaggtccagctggtacagtctggagctgaggtgaagaagcctggggattcagtgaaggtctcctgcaagccttctggttacaattttctcaactatggtatcaactgggtgcgacaggcccctggacaagggcttgagtggatgggatggattagcacttacaccggtaacacaaactatgcacagaagctgcagggcagagtcaccttcaccacagacacatccacgagcacagcctacatggagatgaggagcctgagatctgacgacacggccgtgtattactgtgcgcgcgacctgtactactacgaaggtgttgattactggggtcaaggtactctggtgaccgtctcctcaactagtggccaggccggccagcaccatcaccatcaccatggcgcatacccgtacgacgttccggactacgcttct

SEQ ID NO: 796 - protein, 276 aa, synthetic construct
  REGION 1..276: note = Description of Artificial Sequence: Synthetic polypeptide
QSVLTQPPAASGTPGQRVTISCSGGVSNIGSGALNWYQQLPGTAPKLLIYSYNQRPSGVSDRFSGSRSATSASLAISGLQSEDEADYYCATWDDSVNGWVFGGGTKLTVLGSRGGGGSGGGGSGGGGSLEMAQVQLVQSGAEVKKPGDSVKVSCKPSGYNFLNYGINWVRQAPGQGLEWMGWISTYTGNTNYAQKLQGRVTFTTDTSTSTAYMEMRSLRSDDTAVYYCARDLYYYEGVDYWGQGTLVTVSSTSGQAGQHHHHHHGAYPYDVPDYAS

SEQ ID NO: 797 - DNA, 822 bp, synthetic construct
  misc_feature 1..822: note = Description of Artificial Sequence: Synthetic polynucleotide
  source 1..822: mol_type = other DNA
caggctgtgctgactcagccaccctcagtgtcagtggccccaggaaagacggccagggttacctgtgggggaaacaacattggaagtgaaagtgtgcactggtaccagcagaagccaggccaggcccctgtgttggtcatctattatgataccgaccggccctcagggatccctgagcgattctctggctcccactctgggaccacggccaccctgaccatcagcagggtcgaagccggggatgaggccgactattactgtcaggtgtgggatagtagtagggatcatgtggtattcggcggagggaccaagctgaccgtcctaggttctagaggtggtggtggtagcggcggcggcggctctggtggtggtggatccctcgagatggcccaggtgcagctggtgcagtctgggggaggcgtggtccagcctgggaggtccctgagactctcctgtgcggcctctggattcaccttcagtagctatgctatgcactgggtccgccaggctccaggcaagggactggagtgggtggcagttatatcatatgatggaagcaataaatactacgcagactccgtgaagggcctattcaccatctccagagacaattccaagaacacgctgtatctgcaaatgaacagcctgagagctgaggacacggccgtgtattactgtgcgcgctcttacttcacttctggtttctacgattactggggtcaaggtactctggtgaccgtctcctcaactagtggccaggccggccagcaccatcaccatcaccatggcgcatacccgtacgacgttccggactacgcttct

SEQ ID NO: 798 - protein, 274 aa, synthetic construct
  REGION 1..274: note = Description of Artificial Sequence: Synthetic polypeptide
QAVLTQPPSVSVAPGKTARVTCGGNNIGSESVHWYQQKPGQAPVLVIYYDTDRPSGIPERFSGSHSGTTATLTISRVEAGDEADYYCQVWDSSRDHVVFGGGTKLTVLGSRGGGGSGGGGSGGGGSLEMAQVQLVQSGGGVVQPGRSLRLSCAASGFTFSSYAMHWVRQAPGKGLEWVAVISYDGSNKYYADSVKGLFTISRDNSKNTLYLQMNSLRAEDTAVYYCARSYFTSGFYDYWGQGTLVTVSSTSGQAGQHHHHHHGAYPYDVPDYAS

SEQ ID NO: 799 - DNA, 825 bp, synthetic construct
  misc_feature 1..825: note = Description of Artificial Sequence: Synthetic polynucleotide
  source 1..825: mol_type = other DNA
cagtctgtcgtgacgcagccgccctcagtgtctggggccccagggcagagggtcaccatctcctgcactgggagcagttccaacatcggggcaggttatgatgtaaattggtatcagcagtttccaggaacagcccccaaactcctcatctatggtaacagcaatcggccctcaggggtccctgaccgattctctggctccaagtctggcacctcagcctccctggccatcactgggctccaggctgaggatgaggctgattattactgccagtcctatgacagcagcctgagtggctcttatgtcttcggaactgggaccaaggtcaccgtcctaggttctagaggtggtggtggtagcggcggcggcggctctggtggtggtggatccctcgagatggcccagatgcagctggtgcagtctggggctgaggtgaagaagcctggggcctcagtgaaggtctcctgcaaggcttccggatacaccctcactgaattatccatgcactgggtgcgacaggctcctggaaaagggcttgagtggatgggaggttttgatcctgaagatggtgaaacaatctacgcacagaagttccagggcagagtcaccatgaccgaggacacatctacagacacagcctacatggagctgagcagcctgagatctgaggacactgccgtgtattactgtgcgcgcatgtcttctatgtactacgattggggtcaaggtactctggtgaccgtctcctcaactagtggccaggccggccagcaccatcaccatcaccatggcgcatacccgtacgacgttccggactacgcttct

SEQ ID NO: 800 - protein, 275 aa, synthetic construct
  REGION 1..275: note = Description of Artificial Sequence: Synthetic polypeptide
QSVVTQPPSVSGAPGQRVTISCTGSSSNIGAGYDVNWYQQFPGTAPKLLIYGNSNRPSGVPDRFSGSKSGTSASLAITGLQAEDEADYYCQSYDSSLSGSYVFGTGTKVTVLGSRGGGGSGGGGSGGGGSLEMAQMQLVQSGAEVKKPGASVKVSCKASGYTLTELSMHWVRQAPGKGLEWMGGFDPEDGETIYAQKFQGRVTMTEDTSTDTAYMELSSLRSEDTAVYYCARMSSMYYDWGQGTLVTVSSTSGQAGQHHHHHHGAYPYDVPDYAS

SEQ ID NO: 801 - DNA, 807 bp, synthetic construct
  misc_feature 1..807: note = Description of Artificial Sequence: Synthetic polynucleotide
  source 1..807: mol_type = other DNA
tcctatgtgctgactcagccaccctcagtgtcagtggccccaggaaagacggccaggattacctgtgggggaaacaacattggaagtaaaagtgtgcactggtaccagcagaagccaggccaggcccctgtgctggtcatctattatgatagcgaccggccctcagggatccctgagcgattctctggctccaactctgggaacacggccaccctgaccatcagcagggtcgaagccggggatgaggccgactattactgtcaggtgtgggatagtagtagtgattatgtcttcggaactgggaccaaggtcaccgtcctaggttctagaggtggtggtggtagcggcggcggcggctctggtggtggtggatccctcgagatggccgaggtgcagctggtggagactgggggaggcttggtcaagcctggagggtccctgagactctcctgtgcagcctctggattcaccgtcagtgactactacatgagctggatccgccaggctccagggaagggcctggagtggatttcatacattagtggtagtggtaatagcatatactacgcagactctgtgaagggccgattcaccatctccagggacaacgccaagaactcactggatctgcaaatgaccagcctgagagccgaggacacggccgtatattactgtgcgcgctctactaaattcgattactggggtcaaggtactctggtgaccgtctcctcaactagtggccaggccggccagcaccatcaccatcaccatggcgcatacccgtacgacgttccggactacgcttct

SEQ ID NO: 802 - protein, 269 aa, synthetic construct
  REGION 1..269: note = Description of Artificial Sequence: Synthetic polypeptide
SYVLTQPPSVSVAPGKTARITCGGNNIGSKSVHWYQQKPGQAPVLVIYYDSDRPSGIPERFSGSNSGNTATLTISRVEAGDEADYYCQVWDSSSDYVFGTGTKVTVLGSRGGGGSGGGGSGGGGSLEMAEVQLVETGGGLVKPGGSLRLSCAASGFTVSDYYMSWIRQAPGKGLEWISYISGSGNSIYYADSVKGRFTISRDNAKNSLDLQMTSLRAEDTAVYYCARSTKFDYWGQGTLVTVSSTSGQAGQHHHHHHGAYPYDVPDYAS

SEQ ID NO: 803 - DNA, 828 bp, synthetic construct
  misc_feature 1..828: note = Description of Artificial Sequence: Synthetic polynucleotide
  source 1..828: mol_type = other DNA
ctgcctgtgctgactcagccaccctcagcgtctgggacccccgggcagagggtcaccatctcttgttctggaagcagctccaacgtcggaagttacactgtaaactggtaccggcaactcccaggaacggcccccacactcctcatctataataataatcagcggccctcaggggtccctgaccgattctctgactccaagtctggcacctcggcctccctgaccattagtgggctccagcctgaggatgaggctgattattattgtgcagcatgggatgacaggctgggtggttatgtcttcggaactgggaccaaggtcaccgtcctaggttctagaggtggtggtggtagcggcggcggcggctctggtggtggtggatccctcgagatggccgaggtgcagctggtgcagtctggagcagaggtgaaaaagccgggggagtctctgaagatctcctgtaagggttctggatacagctttaccaactactggatcggctgggtgcgccagatgcccgggaaaggcctggagtggatggggatcatctatcctggtgactctgataccagatacagcccgtccttccaaggccaggtcaccatctcagccgacaagtccatcagcaccgcctacctacagtggagcagcctgaaggcctcggacaccgccatgtattactgtgcgcgctctactggttcttctcatatgtctgatgaatggggtcaaggtactctggtgaccgtctcctcaactagtggccaggccggccagcaccatcaccatcaccatggcgcatacccgtacgacgttccggactacgcttct

SEQ ID NO: 804 - protein, 276 aa, synthetic construct
  REGION 1..276: note = Description of Artificial Sequence: Synthetic polypeptide
LPVLTQPPSASGTPGQRVTISCSGSSSNVGSYTVNWYRQLPGTAPTLLIYNNNQRPSGVPDRFSDSKSGTSASLTISGLQPEDEADYYCAAWDDRLGGYVFGTGTKVTVLGSRGGGGSGGGGSGGGGSLEMAEVQLVQSGAEVKKPGESLKISCKGSGYSFTNYWIGWVRQMPGKGLEWMGIIYPGDSDTRYSPSFQGQVTISADKSISTAYLQWSSLKASDTAMYYCARSTGSSHMSDEWGQGTLVTVSSTSGQAGQHHHHHHGAYPYDVPDYAS

SEQ ID NO: 805 - DNA, 819 bp, synthetic construct
  misc_feature 1..819: note = Description of Artificial Sequence: Synthetic polynucleotide
  source 1..819: mol_type = other DNA
aattttatgctgactcagccccactctgtgtcggagtctccggggaagacggtaaccatctcctgcaccggcagcagtggcagcattgccagcaactatgtgcagtggtaccagcagcgcccgggcagtgcccccaccactgtgatctatgaggataaccaaagaccctctggggtccctgatcggttctctggctccatcgacagctcctccaactctgcctccctcaccatctctggactgaagactgaggacgaggctgactactactgtcagtcttatgatagcagcaatcattgggtgttcggcggagggaccaagctgaccgtcctaggttctagaggtggtggtggtagcggcggcggcggctctggtggtggtggatccctcgagatggcccaagtgcagctacagcagtggggcgcaggactgttgaagccttcggagaccctgtccctcacctgcgctgtctatggtgggtccttcagtggttactactggagctggatccgccagcccccagggaaggggctggagtggattggggagatcactcatagtggaaggtccaactacaacccgtccctcaagagtcgagtcaccatatcagtagacacgtccaagaaccagttctccctgaagctgagctctgtgaccgccgcggacacggccgtgtattactgtgcgcgctcttctatcatgtctgattactggggtcaaggtactctggtgaccgtctcctcaactagtggccaggccggccagcaccatcaccatcaccatggcgcatacccgtacgacgttccggactacgcttct

SEQ ID NO: 806 - protein, 273 aa, synthetic construct
  REGION 1..273: note = Description of Artificial Sequence: Synthetic polypeptide
NFMLTQPHSVSESPGKTVTISCTGSSGSIASNYVQWYQQRPGSAPTTVIYEDNQRPSGVPDRFSGSIDSSSNSASLTISGLKTEDEADYYCQSYDSSNHWVFGGGTKLTVLGSRGGGGSGGGGSGGGGSLEMAQVQLQQWGAGLLKPSETLSLTCAVYGGSFSGYYWSWIRQPPGKGLEWIGEITHSGRSNYNPSLKSRVTISVDTSKNQFSLKLSSVTAADTAVYYCARSSIMSDYWGQGTLVTVSSTSGQAGQHHHHHHGAYPYDVPDYAS

SEQ ID NO: 807 - DNA, 828 bp, synthetic construct
  misc_feature 1..828: note = Description of Artificial Sequence: Synthetic polynucleotide
  source 1..828: mol_type = other DNA
cagtctgtgttgacgcagccgccctcagtgtctggggccccagggcagagggtcaccatctcctgcactgggagcacctccaacatcggggcaggttatgatgtacactggtaccagcagcttccaggaacagcccccaaactcctcatcaacaataacaggaatcggccctcaggggtccctgaccgattctctggctccaagtctggcacgtcagccaccctgggcatcaccggactccagactggggacgaggccgattattactgcggaacatgggatggcagcctgactggtgcagtgttcggcggagggaccaagctgaccgtcctaggttctagaggtggtggtggtagcggcggcggcggctctggtggtggtggatccctcgagatggccgaggtccagctggtgcagtctggggctgaggtgaagaagcctgggtcctcggtgaaggtctcatgcaaggcttctggaggcaccttcagcagctatgctatcagctgggtgcgacaggcccctggacaagggcttgagtggatgggagggatcatccctatctttggtacagcaaactacgcacagaagttccagggcagagtcacgattaccgcggacgaatccacgagcacagcctacatggagctgagcagcctgagatctgaggacacggccgtgtattactgtgcgcgcggttctgctctggaccattacgatcgttggggtcaaggtactctggtgaccgtctcctcaactagtggccaggccggccagcaccatcaccatcaccatggcgcatacccgtacgacgttccggactacgcttct

SEQ ID NO: 808 - protein, 276 aa, synthetic construct
  REGION 1..276: note = Description of Artificial Sequence: Synthetic polypeptide
QSVLTQPPSVSGAPGQRVTISCTGSTSNIGAGYDVHWYQQLPGTAPKLLINNNRNRPSGVPDRFSGSKSGTSATLGITGLQTGDEADYYCGTWDGSLTGAVFGGGTKLTVLGSRGGGGSGGGGSGGGGSLEMAEVQLVQSGAEVKKPGSSVKVSCKASGGTFSSYAISWVRQAPGQGLEWMGGIIPIFGTANYAQKFQGRVTITADESTSTAYMELSSLRSEDTAVYYCARGSALDHYDRWGQGTLVTVSSTSGQAGQHHHHHHGAYPYDVPDYAS

SEQ ID NO: 809 - DNA, 822 bp, synthetic construct
  misc_feature 1..822: note = Description of Artificial Sequence: Synthetic polynucleotide
  source 1..822: mol_type = other DNA
aattttatgctgactcagccccactctgtgtcggagtctccggggaagacggtaaccatctcctgcacccgcagcagtggcagcattgccagcaactatgtgcagtggtaccagcagcgcccgggcagtgcccccaccactgtgatctatgaggataaccaaagaccctctggggtccctgatcggttctctggctccatcgacagctcctccaactctgcctccctcaccatctctggactgaagactgaggacgaggctgactactactgtcagtcttatgatagcaccaattgggtgttcggcggagggaccaagctgaccgtcctaggttctagaggtggtggtggtagcggcggcggcggctctggtggtggtggatccctcgagatggcccaggtgcagctggtgcagtctggggctgaggtgaagaagcctgggtcctcggtgaaggtctcctgcaaggcttctggaggcaccttcagcagctatgctatcagctgggtgcgacaggcccctggacaagggcttgagtggatgggagggatcatccctatctttggtacagcaaactacgcacagaagttccagggcagagtcacgattaccgcggacgaatccacgagcacagcctacatggagctgagcagcctgagatctgaggacactgccgtgtattactgtgcgcgctacaactactacttcaacgattactggggtcaaggtactctggtgaccgtctcctcaactagtggccaggccggccagcaccatcaccatcaccatggcgcatacccgtacgacgttccggactacgcttct

SEQ ID NO: 810 - protein, 274 aa, synthetic construct
  REGION 1..274: note = Description of Artificial Sequence: Synthetic polypeptide
NFMLTQPHSVSESPGKTVTISCTRSSGSIASNYVQWYQQRPGSAPTTVIYEDNQRPSGVPDRFSGSIDSSSNSASLTISGLKTEDEADYYCQSYDSTNWVFGGGTKLTVLGSRGGGGSGGGGSGGGGSLEMAQVQLVQSGAEVKKPGSSVKVSCKASGGTFSSYAISWVRQAPGQGLEWMGGIIPIFGTANYAQKFQGRVTITADESTSTAYMELSSLRSEDTAVYYCARYNYYFNDYWGQGTLVTVSSTSGQAGQHHHHHHGAYPYDVPDYAS

SEQ ID NO: 811 - DNA, 819 bp, synthetic construct
  misc_feature 1..819: note = Description of Artificial Sequence: Synthetic polynucleotide
  source 1..819: mol_type = other DNA
tcctatgtgctgactcagccaccctcagtgtcagtggccccaggaaagacggccaggattacctgtgggggaaacaacattggaagtaaaagtgtgcactggtaccagcagaagccaggccaggcccctgtgctggtcatctattatgatagcgaccggccctcagggatccctgagcgattctctggctccaactctgggaacacggccaccctgaccatcagcagggtcgaagccggggatgaggccgactattactgtcaggtgtgggatagtagtagtgatcatccttatgtcttcggaactgggaccaaggtcaccgtcctaggttctagaggtggtggtggtagcggcggcggcggctctggtggtggtggatccctcgagatggcccagatgcagctggtgcagtctggagctgaggtgaagaagcctggggcctcagtgaaggtctcctgcaaggcttctggttacacctttaccagctatggtatcagctgggtgcgacaggcccctggacaagggcttgagtggatgggatggatcagcgcttacaatggtaacacaaactatgcacagaagctccagggcagagtcaccatgaccacagacacatccacgagcacagcctacatggagctgaggagcctgagatctgacgacactgccgtgtattactgtgcgcgctctatgttcggtgctcatgattcttggggtcaaggtactctggtgaccgtctcctcaactagtggccaggccggccagcaccatcaccatcaccatggcgcatacccgtacgacgttccggactacgcttct

SEQ ID NO: 812 - protein, 273 aa, synthetic construct
  REGION 1..273: note = Description of Artificial Sequence: Synthetic polypeptide
SYVLTQPPSVSVAPGKTARITCGGNNIGSKSVHWYQQKPGQAPVLVIYYDSDRPSGIPERFSGSNSGNTATLTISRVEAGDEADYYCQVWDSSSDHPYVFGTGTKVTVLGSRGGGGSGGGGSGGGGSLEMAQMQLVQSGAEVKKPGASVKVSCKASGYTFTSYGISWVRQAPGQGLEWMGWISAYNGNTNYAQKLQGRVTMTTDTSTSTAYMELRSLRSDDTAVYYCARSMFGAHDSWGQGTLVTVSSTSGQAGQHHHHHHGAYPYDVPDYAS

SEQ ID NO: 813 - DNA, 828 bp, synthetic construct
  misc_feature 1..828: note = Description of Artificial Sequence: Synthetic polynucleotide
  source 1..828: mol_type = other DNA
cagtctgtgttgacgcagccgccctcagtgtctggggccccagggcagagggtcaccatctcctgcactgggagcagctccaacatcggggcaggttttgatgtacactggtaccagctacttccaggaacagcccccaaactcctcatctatgctaacagcaatcggccctcaggggtccctgaccgattctctggctccaagtctggcacctcagcctccctggccatcactgggctcctggctgaggatgaggctgattattactgccagtcctatgacagcagcctgagtggtgtggtattcggcggagggaccaagctgaccgtcctaggttctagaggtggtggtggtagcggcggcggcggctctggtggtggtggatccctcgagatggcccaggtgcagctggtgcaatctggggctgaggtgaagaagcctgggtcctcggtgaaggtctcctgcaaggcttctggaggcaccttcagcagctatgctatcagctgggtgcgacaggcccctggacaagggcttgagtggatgggagggatcatccctatctttggtacagcaaactacgcacagaagttccagggcagagtcacgattaccgcggacgaatccacgagcacagcctacatggagctgagcagcctgagatctgaggacactgccgtgtattactgtgcgcgcggtgcttctttcgaccgtcatgataactggggtcaaggtactctggtgaccgtctcctcaactagtggccaggccggccagcaccatcaccatcaccatggcgcatacccgtacgacgttccggactacgcttct

SEQ ID NO: 814 - protein, 276 aa, synthetic construct
  REGION 1..276: note = Description of Artificial Sequence: Synthetic polypeptide
QSVLTQPPSVSGAPGQRVTISCTGSSSNIGAGFDVHWYQLLPGTAPKLLIYANSNRPSGVPDRFSGSKSGTSASLAITGLLAEDEADYYCQSYDSSLSGVVFGGGTKLTVLGSRGGGGSGGGGSGGGGSLEMAQVQLVQSGAEVKKPGSSVKVSCKASGGTFSSYAISWVRQAPGQGLEWMGGIIPIFGTANYAQKFQGRVTITADESTSTAYMELSSLRSEDTAVYYCARGASFDRHDNWGQGTLVTVSSTSGQAGQHHHHHHGAYPYDVPDYAS

SEQ ID NO: 815 - DNA, 822 bp, synthetic construct
  misc_feature 1..822: note = Description of Artificial Sequence: Synthetic polynucleotide
  source 1..822: mol_type = other DNA
aattttatgctgactcagccccactctgtgtcggagtctccggggaagacggtaaccatctcctgcacccgcagcagtggcagcattgccagcaactatgtgcagtggtaccagcagcgcccgggcagttcccccaccactgtgatctatgaggataaccaaagaccctctggggtccctgatcggttctctggctccatcgacagctcctccaactctgcctccctcaccatctctggactgaagactgaggacgaggctgactactactgtcagtcttatgatagcagcaattgggtgttcggcggagggaccaagctgaccgtcctaggttctagaggtggtggtggtagcggcggcggcggctctggtggtggtggatccctcgagatggccgaggtccagctggtgcagtctggggctgaggtgaagaagcctgggtcctcggtgaaggtctcctgcaaggcttctggaggcaccttcagcagctatgctatcagctgggtgcgacaggcccctggacaagggcttgagtggatgggagggatcatccctatctttggtacagcaaactacgcacagaagttccagggcagagtcacgattaccgcggacgaatccacgagcacagcctacatggagctgagcagcctgagatctgaggacacggccgtgtattactgtgcgcgctctaactactactacaacgattactggggtcaaggtactctggtgaccgtctcctcaactagtggccaggccggccagcaccatcaccatcaccatggcgcatacccgtacgacgttccggactacgcttct

SEQ ID NO: 816 - protein, 274 aa, synthetic construct
  REGION 1..274: note = Description of Artificial Sequence: Synthetic polypeptide
NFMLTQPHSVSESPGKTVTISCTRSSGSIASNYVQWYQQRPGSSPTTVIYEDNQRPSGVPDRFSGSIDSSSNSASLTISGLKTEDEADYYCQSYDSSNWVFGGGTKLTVLGSRGGGGSGGGGSGGGGSLEMAEVQLVQSGAEVKKPGSSVKVSCKASGGTFSSYAISWVRQAPGQGLEWMGGIIPIFGTANYAQKFQGRVTITADESTSTAYMELSSLRSEDTAVYYCARSNYYYNDYWGQGTLVTVSSTSGQAGQHHHHHHGAYPYDVPDYAS

SEQ ID NO: 817 - DNA, 822 bp, synthetic construct
  misc_feature 1..822: note = Description of Artificial Sequence: Synthetic polynucleotide
  source 1..822: mol_type = other DNA
cagtctgtgttgacgcagccgccctcagtgtctggggccccagggcagagggtcaccatctcctgcactgggagcagctccaacatcggggcaggttatgatgtacactggtaccagcagcttccaggaacagcccccaaactcctcatctatggtaacagcaatcggccctcaggggtccctgaccgattctctggctccaagtctggcacctcagcctccctggccatcactgggctccaggctgaggatgaggctgattattactgccagtcctatgacagcagcctgagtggttatgtcttcggaactgggaccaaggtcaccgtcctaggttctagaggtggtggtggtagcggcggcggcggctctggtggtggtggatccctcgagatggcccaggtgcagctggtgcagtctggggctgaggtgaagaagcctggggcctcagtgaaggtctcctgcaaggtttccggatacaccctcactgaattatccatgcactgggtgcgacaggctcctggaaaagggcttgagtggatgggaggttttgatcctgaagatggtgaaacaatctacgcacagaagttccagggcagagtcaccatgaccgaggacacatctacagacacagcctacatggagctgagcagcctgagatctgaggacactgccgtgtattactgtgcgcgctactctggtgtttactacgattggggtcaaggtactctggtgaccgtctcctcaactagtggccaggccggccagcaccatcaccatcaccatggcgcatacccgtacgacgttccggactacgcttct

SEQ ID NO: 818 - protein, 274 aa, synthetic construct
  REGION 1..274: note = Description of Artificial Sequence: Synthetic polypeptide
QSVLTQPPSVSGAPGQRVTISCTGSSSNIGAGYDVHWYQQLPGTAPKLLIYGNSNRPSGVPDRFSGSKSGTSASLAITGLQAEDEADYYCQSYDSSLSGYVFGTGTKVTVLGSRGGGGSGGGGSGGGGSLEMAQVQLVQSGAEVKKPGASVKVSCKVSGYTLTELSMHWVRQAPGKGLEWMGGFDPEDGETIYAQKFQGRVTMTEDTSTDTAYMELSSLRSEDTAVYYCARYSGVYYDWGQGTLVTVSSTSGQAGQHHHHHHGAYPYDVPDYAS

SEQ ID NO: 819 - DNA, 822 bp, synthetic construct
  misc_feature 1..822: note = Description of Artificial Sequence: Synthetic polynucleotide
  source 1..822: mol_type = other DNA
aattttatgctgactcagccccactctgtgtcggggtctccggggaagacggtaaccatctcctgcaccggcagcagtggcagcattgccgacaactttgtgcagtggtaccagcagcgcccgggcggtgtccccaccactgtgatctttaatgatgacgaaagaccctctggcgtccctgatcggttctctggctccatcgacacctcctccaattctgcctccctcaccatctctggactgaagactgaggacgaggctgactactactgtcagtcttatgataataataatcgaggggtgttcggcggagggaccaagctgaccgtcctaggttctagaggtggtggtggtagcggcggcggcggctctggtggtggtggatccctcgagatggcccaggtccagctggtgcagtctggggctgaggtgaagaagcctgggtcctcggtgaaggtctcctgcaaggcttctggaggcaccttcagcagctatgctatcagctgggtgcgacaggcccctggacaagggcttgagtggatgggatggatgaaccctaacagtggtaacacaggctatgcacagaagttccagggcagagtcaccatgaccaggaacacctccataagcacagcctacatggagctgagcaacctgagatctgaggacacggccgtgtattactgtgcgcgctactactcttacggttacgattggggtcaaggtactctggtgaccgtctcctcaactagtggccaggccggccagcaccatcaccatcaccatggcgcatacccgtacgacgttccggactacgcttct

SEQ ID NO: 820 - protein, 274 aa, synthetic construct
  REGION 1..274: note = Description of Artificial Sequence: Synthetic polypeptide
NFMLTQPHSVSGSPGKTVTISCTGSSGSIADNFVQWYQQRPGGVPTTVIFNDDERPSGVPDRFSGSIDTSSNSASLTISGLKTEDEADYYCQSYDNNNRGVFGGGTKLTVLGSRGGGGSGGGGSGGGGSLEMAQVQLVQSGAEVKKPGSSVKVSCKASGGTFSSYAISWVRQAPGQGLEWMGWMNPNSGNTGYAQKFQGRVTMTRNTSISTAYMELSNLRSEDTAVYYCARYYSYGYDWGQGTLVTVSSTSGQAGQHHHHHHGAYPYDVPDYAS

SEQ ID NO: 821 - DNA, 840 bp, synthetic construct
  misc_feature 1..840: note = Description of Artificial Sequence: Synthetic polynucleotide
  source 1..840: mol_type = other DNA
cagtctgtcgtgacgcagccgccctcagtgtctggggccccagggcagacggtcaccatctcctgcactgggggcagctccaacatcgggacaggttattttgtaaattggtaccagcaggttccaggaaaagcccccaaactcctcatcctgggtaacaataatcggccctcgggggtccctgaccgactctccggctccacgtccggcacctcagcctccctggccatcactgggctccaggctgaggatgagggtacttattactgccagtcctatgacagcagcctgagtggttatgtcttcggaactgggaccaaggtcaccgtcctaggttctagaggtggtggtggtagcggcggcggcggctctggtggtggtggatccctcgagatggcccaggtacagctgcagcagtcaggtccaggactggtgaagccctcgcagaccctctcactcacctgtggcatctccggggacagtgtctctaccaacagtgttgcttggcactggatcaggcagtccccatcgagaggccttgagtggctgggaaggacatactacaggtccaagtggtctaatgactatggagtatctgtgaaaagtcgaatcaccatcatcccagacacatccaagaaccagttctccctgcagctgaactctgtgactcccgaggacacggctgtgtattactgtgcgcgctcttcttcttggtaccagatcttcgattactggggtcaaggtactctggtgaccgtctcctcaactagtggccaggccggccagcaccatcaccatcaccatggcgcatacccgtacgacgttccggactacgcttct

SEQ ID NO: 822 - protein, 280 aa, synthetic construct
  REGION 1..280: note = Description of Artificial Sequence: Synthetic polypeptide
QSVVTQPPSVSGAPGQTVTISCTGGSSNIGTGYFVNWYQQVPGKAPKLLILGNNNRPSGVPDRLSGSTSGTSASLAITGLQAEDEGTYYCQSYDSSLSGYVFGTGTKVTVLGSRGGGGSGGGGSGGGGSLEMAQVQLQQSGPGLVKPSQTLSLTCGISGDSVSTNSVAWHWIRQSPSRGLEWLGRTYYRSKWSNDYGVSVKSRITIIPDTSKNQFSLQLNSVTPEDTAVYYCARSSSWYQIFDYWGQGTLVTVSSTSGQAGQHHHHHHGAYPYDVPDYAS

SEQ ID NO: 823 - DNA, 837 bp, synthetic construct
  misc_feature 1..837: note = Description of Artificial Sequence: Synthetic polynucleotide
  source 1..837: mol_type = other DNA
aattttatgctgactcagccccactctgtgtcggagtctccggggaagacggtaaccatctcctgcaccggcagcagcgacagcatagccaacaactatgttcagtggtaccagcagcgcccgggcagtgcccccaccaatgtgatctacgaagatgtccaaagaccctctggggtccctgatcggttctctgggtccatcgacagctcctccaactctgcctccctcaccatctctggactgaagactgaggacgaggctgtctactattgtcagtcttatcatagcgacaatcgttgggtgttcggcggcgggaccaagctgaccgtcctaggttctagaggtggtggtggtagcggcggcggcggctctggtggtggtggatccctcgagatggcccaggtgcagctggtggagtctgggggaggcttggtacagcctggggggtccctgagactctcctgtgcagcctctggattcacctttagcagctatgccatgagctgggtccgccaggctccagggaaggggctggagtgggtctcagctattagtggtagtggtggtagcacatactacgcagactccgtgaagggccggttcaccatctccagagacaattccaagaacacgctgtatctgcaaatgaacagcctgagagccgaggacacggccgtatattactgtgcgcgctctggtgcttactgggactactctgtttacgatgaatggggtcaaggtactctggtgaccgtctcctcaactagtggccaggccggccagcaccatcaccatcaccatggcgcatacccgtacgacgttccggactacgcttct

SEQ ID NO: 824 - protein, 279 aa, synthetic construct
  REGION 1..279: note = Description of Artificial Sequence: Synthetic polypeptide
NFMLTQPHSVSESPGKTVTISCTGSSDSIANNYVQWYQQRPGSAPTNVIYEDVQRPSGVPDRFSGSIDSSSNSASLTISGLKTEDEAVYYCQSYHSDNRWVFGGGTKLTVLGSRGGGGSGGGGSGGGGSLEMAQVQLVESGGGLVQPGGSLRLSCAASGFTFSSYAMSWVRQAPGKGLEWVSAISGSGGSTYYADSVKGRFTISRDNSKNTLYLQMNSLRAEDTAVYYCARSGAYWDYSVYDEWGQGTLVTVSSTSGQAGQHHHHHHGAYPYDVPDYAS

SEQ ID NO: 825 - DNA, 819 bp, synthetic construct
  misc_feature 1..819: note = Description of Artificial Sequence: Synthetic polynucleotide
  source 1..819: mol_type = other DNA
cagtctgtgttgactcagccaccctcagtgtccgtgtccccaggacagacagccaccatcgcctgttctggacataaattgggggataaatatgcttcctggtatcagcagaagtcgggccagtcccctgtgttgatcatctatcaggataataagcggccctcagggattcctgagcgattctctggctccaactctgggaacacagccactctgaccatcagcgggacccaggctctggatgaggctgactattattgtcaggcgtgggacagtagtacttatgtggcattcggcggagggaccaagctgaccgtcctaggttctagaggtggtggtggtagcggcggcggcggctctggtggtggtggatccctcgagatggcccaggtgcagctgcaggagtccggcccaggactggtgaagccttcggagaccctgtccctcacctgcgttgtctctggtggctccatcagcagtagtaactggtggagctgggtccgccagcccccagggaaggggctggagtggattggggaaatctatcatagtgggagccccaactacaacccatccctcaagagtcgagtcaccatatcagtagacaagtccaagaaccagttctccctgaagctgagctctgtgaccgccgcggacacggccgtgtattactgtgcgcgcatgactactcatactttcggttacgatgcttggggtcaaggtactctggtgaccgtctcctcaactagtggccaggccggccagcaccatcaccatcaccatggcgcatacccgtacgacgttccggactacgcttct

SEQ ID NO: 826 - protein, 273 aa, synthetic construct
  REGION 1..273: note = Description of Artificial Sequence: Synthetic polypeptide
QSVLTQPPSVSVSPGQTATIACSGHKLGDKYASWYQQKSGQSPVLIIYQDNKRPSGIPERFSGSNSGNTATLTISGTQALDEADYYCQAWDSSTYVAFGGGTKLTVLGSRGGGGSGGGGSGGGGSLEMAQVQLQESGPGLVKPSETLSLTCVVSGGSISSSNWWSWVRQPPGKGLEWIGEIYHSGSPNYNPSLKSRVTISVDKSKNQFSLKLSSVTAADTAVYYCARMTTHTFGYDAWGQGTLVTVSSTSGQAGQHHHHHHGAYPYDVPDYAS

SEQ ID NO: 827 - DNA, 810 bp, synthetic construct
  misc_feature 1..810: note = Description of Artificial Sequence: Synthetic polynucleotide
  source 1..810: mol_type = other DNA
cagcctgtgctgactcagccaccctcagtgtcagtggccccaggaaagacggccacgattacttgtgggggaaacaacattggaagtgaaagtgtgcactggtaccaccagaagccaggccaggcccctgtgttggtcatctatgatgatgccggccggccctcagggatccctgagcgattcactggctccaactctgggaacacggccaccctgaccatcagcagggtcgaagccggggatgaggccgactattactgtcaggtgtgggacagaaatagtgctcagtttgtcttcggacctgggaccaaggtcaccgtcctaggttctagaggtggtggtggtagcggcggcggcggctctggtggtggtggatccctcgagatggccgaggtccagctggtgcagtctggagctgaggtgaagaagcctggggcctcagtgaaggtctcctgcaaggcttctggttacacctttaccagctatggtatcagctgggtgcgacaggcccctggacaagggcttgagtggatgggatggatcagcgcttacaatggtaacacaaactatgcacagaagctccagggcagagtcaccatgaccacagacacatccacgagcacagcctacatggagctgaggagcctgagatctgacgacacggccgtgtattactgtgcgcgcggtgttcatctggattggtggggtcaaggtactctggtgaccgtctcctcaactagtggccaggccggccagcaccatcaccatcaccatggcgcatacccgtacgacgttccggactacgcttct

SEQ ID NO: 828 - protein, 270 aa, synthetic construct
  REGION 1..270: note = Description of Artificial Sequence: Synthetic polypeptide
QPVLTQPPSVSVAPGKTATITCGGNNIGSESVHWYHQKPGQAPVLVIYDDAGRPSGIPERFTGSNSGNTATLTISRVEAGDEADYYCQVWDRNSAQFVFGPGTKVTVLGSRGGGGSGGGGSGGGGSLEMAEVQLVQSGAEVKKPGASVKVSCKASGYTFTSYGISWVRQAPGQGLEWMGWISAYNGNTNYAQKLQGRVTMTTDTSTSTAYMELRSLRSDDTAVYYCARGVHLDWWGQGTLVTVSSTSGQAGQHHHHHHGAYPYDVPDYAS

SEQ ID NO: 829 - DNA, 846 bp, synthetic construct
  misc_feature 1..846: note = Description of Artificial Sequence: Synthetic polynucleotide
  source 1..846: mol_type = other DNA
cagtctgtcgtgacgcagccaccctcagcgtctgggacccccgggcagagggtcaccatctcttgttctggaagcagctccaacatcggaagtaattatgtatactggtaccagcagctcccaggaacggcccccaaactcctcatctatagtaataatcagcggccctcaggggtccctgaccgattctctggctccaagtctggcacctcagcctccctggccatcagtgggctccggtccgaggatgaggctgattattactgtgcagcatgggatgacagcctgagtggttatgtcttcggaactgggaccaagctgaccgtcctaggttctagaggtggtggtggtagcggcggcggcggctctggtggtggtggatccctcgagatggcccaggtgcagctacagcagtggggcgcaggactgttgaagccttcggagaccctgtccctcacctgcgctgtctatggtgggtccttcagtggttactactggagctggatccgccagcccccagggaaggggctggagtggattggggaaatcaatcatagtggaagcaccaactacaacccgtccctcaagagtcgagtcaccatatcagtagacacgtccaagaaccagttctccctgaagctgagctctgtgaccgccgcggacacggccgtgtattactgtgcgcgcctgtacgaaggtggttaccatggttggggttcttggctgtcttctgattcttggggtcaaggtactctggtgaccgtctcctcaactagtggccaggccggccagcaccatcaccatcaccatggcgcatacccgtacgacgttccggactacgcttct

SEQ ID NO: 830 - protein, 282 aa, synthetic construct
  REGION 1..282: note = Description of Artificial Sequence: Synthetic polypeptide
QSVVTQPPSASGTPGQRVTISCSGSSSNIGSNYVYWYQQLPGTAPKLLIYSNNQRPSGVPDRFSGSKSGTSASLAISGLRSEDEADYYCAAWDDSLSGYVFGTGTKLTVLGSRGGGGSGGGGSGGGGSLEMAQVQLQQWGAGLLKPSETLSLTCAVYGGSFSGYYWSWIRQPPGKGLEWIGEINHSGSTNYNPSLKSRVTISVDTSKNQFSLKLSSVTAADTAVYYCARLYEGGYHGWGSWLSSDSWGQGTLVTVSSTSGQAGQHHHHHHGAYPYDVPDYAS

SEQ ID NO: 831 - DNA, 825 bp, synthetic construct
  misc_feature 1..825: note = Description of Artificial Sequence: Synthetic polynucleotide
  source 1..825: mol_type = other DNA
cagtctgtgttgactcagccaccctcagcgtctgggacccccgggcagagggtcaccatctcttgttctggaagcagctccaacatcggaagtaatactgtaaactggtaccagcagctcccaggaacggcccccaaactcctcatctatagtaataatcagcggccctcaggggtccctgaccgattctctggctccaagtctggcacctcagcctccctggccatcagtgggctccagtctgaggatgaggctgattattactgtgcagcatgggatgacagcctgaatggttattgggtgttcggcggagggaccaagctgaccgtcctaggttctagaggtggtggtggtagcggcggcggcggctctggtggtggtggatccctcgagatggcccaggtgcagctacagcagtggggcgcaggactgttgaagccttcggagaccctgtccctcacctgcgctgtctatggtgggtccttcagtggttactactggagctggatccgccagcccccagggaaggggctggagtggattggggaaatcaatcatagtggaagcaccaactacaacccgtccctcaagagtcgagtcaccatatcagtagacacgtccaagaaccagttctccctgaagctgagctctgtgaccgccgcggacacggctgtgtattactgtgcgcgcgaaggggcatttgatgcttttgatatctggggccaagggacaatggtcaccgtctcttcaactagtggccaggccggccagcaccatcaccatcaccatggcgcatacccgtacgacgttccggactacgcttct

SEQ ID NO: 832 - protein, 275 aa, synthetic construct
  REGION 1..275: note = Description of Artificial Sequence: Synthetic polypeptide
QSVLTQPPSASGTPGQRVTISCSGSSSNIGSNTVNWYQQLPGTAPKLLIYSNNQRPSGVPDRFSGSKSGTSASLAISGLQSEDEADYYCAAWDDSLNGYWVFGGGTKLTVLGSRGGGGSGGGGSGGGGSLEMAQVQLQQWGAGLLKPSETLSLTCAVYGGSFSGYYWSWIRQPPGKGLEWIGEINHSGSTNYNPSLKSRVTISVDTSKNQFSLKLSSVTAADTAVYYCAREGAFDAFDIWGQGTMVTVSSTSGQAGQHHHHHHGAYPYDVPDYAS

SEQ ID NO: 833 - DNA, 831 bp, synthetic construct
  misc_feature 1..831: note = Description of Artificial Sequence: Synthetic polynucleotide
  source 1..831: mol_type = other DNA
tcctatgagctgactcagccaccctcagcgtctgggacccccgggcagagggtcaccatctcttgttctggaagcagctccaacatcggaagtaattatgtatactggtaccagcagctcccaggaacggcccccaaactcttcatctataggaataatcagcggccctcaggggtccctgaccgattctctggctccaagtctggcacctcagcctccctggccatcagtgggctccggtccgaggatgaggctgattattactgtgcagcatgggatgacagcctgagtggttatctcttcggaactgggaccaaggtcaccgtcctaggttctagaggtggtggtggtagcggcggcggcggctctggtggtggtggatccctcgagatggccgaggtgcagctggtggagtctgggggaggcttggtacagcctggcaggtccctgagactctcctgtgcagcctctggattcacctttgatgattatgccatgcactgggtccggcaagctccagggaagggcctggagtgggtctcaggtattagttggaatagtggtagcataggctatgcggactctgtgaagggccgattcaccatctccagagacaacgccaagaactccctgtatctgcaaatgaacagtctgagagctgaggacacggccttgtattactgtgcaaatggcgactccaactactactacggtatggacgtctggggccaagggaccacggtcaccgtctcctcaactagtggccaggccggccagcaccatcaccatcaccatggcgcatacccgtacgacgttccggactacgcttct

SEQ ID NO: 834 - protein, 277 aa, synthetic construct
  REGION 1..277: note = Description of Artificial Sequence: Synthetic polypeptide
SYELTQPPSASGTPGQRVTISCSGSSSNIGSNYVYWYQQLPGTAPKLFIYRNNQRPSGVPDRFSGSKSGTSASLAISGLRSEDEADYYCAAWDDSLSGYLFGTGTKVTVLGSRGGGGSGGGGSGGGGSLEMAEVQLVESGGGLVQPGRSLRLSCAASGFTFDDYAMHWVRQAPGKGLEWVSGISWNSGSIGYADSVKGRFTISRDNAKNSLYLQMNSLRAEDTALYYCANGDSNYYYGMDVWGQGTTVTVSSTSGQAGQHHHHHHGAYPYDVPDYAS

SEQ ID NO: 835 - DNA, 843 bp, synthetic construct
  misc_feature 1..843: note = Description of Artificial Sequence: Synthetic polynucleotide
  source 1..843: mol_type = other DNA
cagtctgccctgactcagcctgcctccgtgtccgggtctcctggacagtcgatcaccatctcctgcactggaaccagcagtgacattggtggttataactatgtctcctggtaccaacaacacccaggcaaagcccccaaactcatgatttatgatgtcagtaatcggccctcaggggtttctaatcgcttctctggctccaagtctggcaacacggcctccctgaccatctctgggctccaggctgaggacgaggctgattattactgcatctcatatacacgcacctggaacccctatgtcttcgggagtgggaccaaggtcaccgtcctaggttctagaggtggtggtggtagcggcggcggcggctctggtggtggtggatccctcgagatggccgaggtgcagctggtgcagtctgggggaggcgtggtacagcctggggggtccctgagactctcctgtgcagcctctggattcacctttgatgattatgccatgcactgggtccgtcaagctccagggaagggtctggagtgggtctctcttattagtggggatggtggtagcacatactatgcagactctgtgaagggccgattcaccatctccagagacaacagcaaaaactccctgtatctgcaaatgaacagtctgagaactgaggacaccgccttgtattactgtgcaaaagatcgggcagcagctggctactactactacggtatggacgtctggggccaagggaccacggtcaccgtctcctcaactagtggccaggccggccagcaccatcaccatcaccatggcgcatacccgtacgacgttccggactacgcttct

SEQ ID NO: 836 - protein, 281 aa, synthetic construct
  REGION 1..281: note = Description of Artificial Sequence: Synthetic polypeptide
QSALTQPASVSGSPGQSITISCTGTSSDIGGYNYVSWYQQHPGKAPKLMIYDVSNRPSGVSNRFSGSKSGNTASLTISGLQAEDEADYYCISYTRTWNPYVFGSGTKVTVLGSRGGGGSGGGGSGGGGSLEMAEVQLVQSGGGVVQPGGSLRLSCAASGFTFDDYAMHWVRQAPGKGLEWVSLISGDGGSTYYADSVKGRFTISRDNSKNSLYLQMNSLRTEDTALYYCAKDRAAAGYYYYGMDVWGQGTTVTVSSTSGQAGQHHHHHHGAYPYDVPDYAS

SEQ ID NO: 837 - DNA, 825 bp, synthetic construct
  misc_feature 1..825: note = Description of Artificial Sequence: Synthetic polynucleotide
  source 1..825: mol_type = other DNA
ctgcctgtgctgactcagccaccctcagtgtccgtgtccccaggacagacagccatcatcacctgctctggagataaattgggggaaaaatatgtttcctggtatcagcagaagccaggccagtcccctgtactggtcatcgatcaagataccaggaggccctcagggatccctgagcgattctctggctccaactctgggaccacagccactctgaccatcagcgggacccaggctatggatgaggctgactattactgtcaggcgtgggacaggggtgtggtattcggcggagggaccaagctgaccgtcctaggttctagaggtggtggtggtagcggcggcggcggctctggtggtggtggatccctcgagatggccgaggtgcagctggtggagtctgggggagacttggtacagcctggcaggtccctgagactctcctgtgcagcctctggattcacctttaatgattatgccatgcactgggtccggcaagctccagggaagggcctggagtgggtctcaggtattagttggagtggtaataacataggctatgcggactctgtgaagggccgattcaccatctccagagacaacgccaagaactccctgtatctgcaaatgaacagtctgagagctgaggacacggccttgtattactgtgcaaaagatagtatacggtatggcatcacctggggaggttttgactactggggccagggaaccctggtcaccgtctcctcaactagtggccaggccggccagcaccatcaccatcaccatggcgcatacccgtacgacgttccggactacgcttct

SEQ ID NO: 838 - protein, 275 aa, synthetic construct
  REGION 1..275: note = Description of Artificial Sequence: Synthetic polypeptide
LPVLTQPPSVSVSPGQTAIITCSGDKLGEKYVSWYQQKPGQSPVLVIDQDTRRPSGIPERFSGSNSGTTATLTISGTQAMDEADYYCQAWDRGVVFGGGTKLTVLGSRGGGGSGGGGSGGGGSLEMAEVQLVESGGDLVQPGRSLRLSCAASGFTFNDYAMHWVRQAPGKGLEWVSGISWSGNNIGYADSVKGRFTISRDNAKNSLYLQMNSLRAEDTALYYCAKDSIRYGITWGGFDYWGQGTLVTVSSTSGQAGQHHHHHHGAYPYDVPDYAS

SEQ ID NO: 839 - DNA, 825 bp, synthetic construct
  misc_feature 1..825: note = Description of Artificial Sequence: Synthetic polynucleotide
  source 1..825: mol_type = other DNA
cagcctgtgctgactcagccaccctcggtgtccaagggcttgagacagaccgccacactcacctgcactgggaacagcaacaatgttggcaacctaggagtagcttggctgcagcagcaccagggccaccctcccaaactcctatcctacaggaataacaaccggccctcagggatctcagagagattatctgcatccaggtcaggaaacacagcctccctgaccattactggactccagcctgaggacgaggctgactattactgctcagcatgggacagtagcctcagtgcttgggtgttcggcggagggaccaagctgaccgtcctaggttctagaggtggtggtggtagcggcggcggcggctctggtggtggtggatccctcgagatggccgaggtgcagctggtggagtctgggggagtcgtggtacagcctggggggtccctgagactctcctgtgcagcctctggattcacctttgatgattatgccatgcactgggtccgtcaagctccggggaagggtctggagtgggtctctcttattaattgggatggtggtagcacctactatgcagactctgtgaagggtcgattcaccatctccagagacaacagcaaaaactccctgtatctgcaaatgaacagtctgagagctgaggacaccgccttgtattactgtgcaaaagggatgggcctgagggcgtttgactactggggccagggaaccctggtcaccgtctcctcaactagtggccaggccggccagcaccatcaccatcaccatggcgcatacccgtacgacgttccggactacgcttct

SEQ ID NO: 840 - protein, 275 aa, synthetic construct
  REGION 1..275: note = Description of Artificial Sequence: Synthetic polypeptide
QPVLTQPPSVSKGLRQTATLTCTGNSNNVGNLGVAWLQQHQGHPPKLLSYRNNNRPSGISERLSASRSGNTASLTITGLQPEDEADYYCSAWDSSLSAWVFGGGTKLTVLGSRGGGGSGGGGSGGGGSLEMAEVQLVESGGVVVQPGGSLRLSCAASGFTFDDYAMHWVRQAPGKGLEWVSLINWDGGSTYYADSVKGRFTISRDNSKNSLYLQMNSLRAEDTALYYCAKGMGLRAFDYWGQGTLVTVSSTSGQAGQHHHHHHGAYPYDVPDYAS

SEQ ID NO: 841 - DNA, 840 bp, synthetic construct
  misc_feature 1..840: note = Description of Artificial Sequence: Synthetic polynucleotide
  source 1..840: mol_type = other DNA
cagtctgtgttgactcagccaccctcagcgtctgggacccccgggcagagggtcaccatctcctgttctggaagcagctccaacatcggaagtaatactgtaaactggtaccagcagctcccaggaacggcccccaaactcctcatctatagtaatgatcagcggccctcaggggtccctgaccgattctctggctccaagtccggcacctcagcctccctggccatcagtgggctccagtctgaggatgaggctgattattactgtgcttcatgggatgacagcctgaatggccgttatgtcttcggaactgggaccaaggtcaccgtcctaggttctagaggtggtggtggtagcggcggcggcggctctggtggtggtggatccctcgagatggcccaggtccagctggtacagtctggggctgaggtgaggaagcctggggcctcagtgaaggtttcctgcaagacttctggatacaccttcagttggtatgctatacattgggtgcgccaggcccccggacaaaggcttgagtggatgggatggatcaacgctggcaatggaaacacaaaatattcacagaaatttcagggcagagtcagtcttaccagggacacatccgcgagcacagcctacatggagctgagcagcctgagatctgatgacacggctgtgtattactgtgcgagacccgataattatggttcgggtggggatgtttttgatatctggggccaagggacaatggtcaccgtctcttcaactagtggccaggccggccagcaccatcaccatcaccatggcgcatacccgtacgacgttccggactacgcttct

SEQ ID NO: 842 - protein, 280 aa, synthetic construct
  REGION 1..280: note = Description of Artificial Sequence: Synthetic polypeptide
QSVLTQPPSASGTPGQRVTISCSGSSSNIGSNTVNWYQQLPGTAPKLLIYSNDQRPSGVPDRFSGSKSGTSASLAISGLQSEDEADYYCASWDDSLNGRYVFGTGTKVTVLGSRGGGGSGGGGSGGGGSLEMAQVQLVQSGAEVRKPGASVKVSCKTSGYTFSWYAIHWVRQAPGQRLEWMGWINAGNGNTKYSQKFQGRVSLTRDTSASTAYMELSSLRSDDTAVYYCARPDNYGSGGDVFDIWGQGTMVTVSSTSGQAGQHHHHHHGAYPYDVPDYAS

SEQ ID NO: 843 - DNA, 819 bp, synthetic construct
  misc_feature 1..819: note = Description of Artificial Sequence: Synthetic polynucleotide
  source 1..819: mol_type = other DNA
aattttatgctgactcagccccactctgtgtcggagtctccggggaagacggtaaccatctcctgcacccgcagcagtggcagcattgccagcaactttgtgcagtggtaccagcagcgcccgggcagtgcccccacccctatgatctatgaggataacaacagaccccctggggtccctgatcggttctctgcctccgtcgacagctcctccaactctgcctccctcaccatctctggactgaagactgaggacgaggctgactactactgtcagtcttatgataccagcaatgtggtattcggcggggggaccaagctgaccgtcctaggttctagaggtggtggtggtagcggcggcggcggctctggtggtggtggatccctcgagatggccgaggtgcagctggtggagtctgggggaggcttggtacagcctggagggtccctgagactctcctgtgcagcctctggattcaccttcagtagttatgaaatgaactgggtccgccaggctccagggaaggggctggagtgggtttcatacattagtagtagtggtagtaccatatactacgcagactctgtgaagggccgattcaccatctccagagacaacgccaagaactcactgtatctgcaaatgaacagcctgagagccgaggacacggctgtttattactgtgcacgctgggactacggtatggacgtctggggccaagggaccacggtcaccgtctcctcaactagtggccaggccggccagcaccatcaccatcaccatggcgcatacccgtacgacgttccggactacgcttct

SEQ ID NO: 844 - protein, 273 aa, synthetic construct
  REGION 1..273: note = Description of Artificial Sequence: Synthetic polypeptide
NFMLTQPHSVSESPGKTVTISCTRSSGSIASNFVQWYQQRPGSAPTPMIYEDNNRPPGVPDRFSASVDSSSNSASLTISGLKTEDEADYYCQSYDTSNVVFGGGTKLTVLGSRGGGGSGGGGSGGGGSLEMAEVQLVESGGGLVQPGGSLRLSCAASGFTFSSYEMNWVRQAPGKGLEWVSYISSSGSTIYYADSVKGRFTISRDNAKNSLYLQMNSLRAEDTAVYYCARWDYGMDVWGQGTTVTVSSTSGQAGQHHHHHHGAYPYDVPDYAS

SEQ ID NO: 845 - DNA, 837 bp, synthetic construct
  misc_feature 1..837: note = Description of Artificial Sequence: Synthetic polynucleotide
  source 1..837: mol_type = other DNA
caggctgtgctgactcagccaccctcagcgtctggggcccccgggcagagggtcaccgtctcttgttctggaagcaactccaacatcggaagtaactacgttaactggtaccagcagttcccaggaacggcccccaaactcctcatgtatagtagtagtcagcggccctcaggggtccctgaccgattctctggctccaagtctggcacctcagcctccctggccatcagtgggctccactctgaggatgaggctgattattactgtgctacatgggatgacagcctgaatgcttgggtgttcggcggagggaccaagctgaccgtcctaggttctagaggtggtggtggtagcggcggcggcggctctggtggtggtggatccctcgagatggccgaggtccagctggtgcagtctggggctgaggtgaggaagcctggggcctcagtgaaggtttcctgcaagacttctggatacaccttcacttggtatgctatacattgggtgcgccaggcccccggacaaaggcttgagtggatgggatggatcaacgctggcagtggaaacacaaaatattcacagaaatttcagggcagagtcacccttaccagggacacatccgcgagcacagcgtacatggagctgagcagcctgagatctgatgacacggctgtgtattactgtgcgagacccaataactatggttcgggtggggatgtttttgatatctggggccaagggacaatggtcaccgtctcttcaactagtggccaggccggccagcaccatcaccatcaccatggcgcatacccgtacgacgttccggactacgcttct

SEQ ID NO: 846 - protein, 279 aa, synthetic construct
  REGION 1..279: note = Description of Artificial Sequence: Synthetic polypeptide
QAVLTQPPSASGAPGQRVTVSCSGSNSNIGSNYVNWYQQFPGTAPKLLMYSSSQRPSGVPDRFSGSKSGTSASLAISGLHSEDEADYYCATWDDSLNAWVFGGGTKLTVLGSRGGGGSGGGGSGGGGSLEMAEVQLVQSGAEVRKPGASVKVSCKTSGYTFTWYAIHWVRQAPGQRLEWMGWINAGSGNTKYSQKFQGRVTLTRDTSASTAYMELSSLRSDDTAVYYCARPNNYGSGGDVFDIWGQGTMVTVSSTSGQAGQHHHHHHGAYPYDVPDYAS

SEQ ID NO: 847 - DNA, 834 bp, synthetic construct
  misc_feature 1..834: note = Description of Artificial Sequence: Synthetic polynucleotide
  source 1..834: mol_type = other DNA
cagtctgtcgtgacgcagccgccctcagtgtctgcggccccaggacagaaggtcaccatctcctgctctggaagcagctccaacattgggaataattatgtatcctggtaccagcagctcccaggaacagcccccaaactcctcatttatgacaataataagcgaccctcagggattcctgaccgattctctggctccaagtctggcacgtcagccaccctgggcatcaccggactccagactggggacgaggccgattattactgcggaacatgggatagcagcctgagtgcttatgtcttcggaactgggaccaaggtcaccgtcctaggttctagaggtggtggtggtagcggcggcggcggctctggtggtggtggatccctcgagatggcccaggtccagctggtgcagtctggggctgaggtgaagaagcctggggcctcagtgaaagtttcctgcaaggcttctggatacaccttcacgaactatgctctgcattgggtgcgccaggcccccggacaagggcttgagtggatggcatggatcaacggtggcaatggtaacacaaaatattcacagaacttccagggcagagtcaccattaccagggacacatccgcgagcacagcctatatggagctgagcagcctgagatctgaagacacggctgtgtattactgtgcgaaaccggaggaaacagctggaacaatccactttgactactggggccagggaaccccggtcaccgtctcctcaactagtggccaggccggccagcaccatcaccatcaccatggcgcatacccgtacgacgttccggactacgcttct

SEQ ID NO: 848 - protein, 278 aa, synthetic construct
  REGION 1..278: note = Description of Artificial Sequence: Synthetic polypeptide
QSVVTQPPSVSAAPGQKVTISCSGSSSNIGNNYVSWYQQLPGTAPKLLIYDNNKRPSGIPDRFSGSKSGTSATLGITGLQTGDEADYYCGTWDSSLSAYVFGTGTKVTVLGSRGGGGSGGGGSGGGGSLEMAQVQLVQSGAEVKKPGASVKVSCKASGYTFTNYALHWVRQAPGQGLEWMAWINGGNGNTKYSQNFQGRVTITRDTSASTAYMELSSLRSEDTAVYYCAKPEETAGTIHFDYWGQGTPVTVSSTSGQAGQHHHHHHGAYPYDVPDYAS

SEQ ID NO: 849 - DNA, 849 bp, synthetic construct
  misc_feature 1..849: note = Description of Artificial Sequence: Synthetic polynucleotide
  source 1..849: mol_type = other DNA
caggctgtgctgactcagccccactctgtgtcggagtctccggggaagacggtaaccatctcctgcacccgcagcagtggcagcattgccagcaactatgtgcagtggtaccagcagcgcccgggcagtgcccccaccactgtgatctatgaggataaccaaagaccctctggggtccctgatcggttctctggctccatcgacagctcctccaactctgcctccctcaccatctctggactgaagactgaggacgaggctgactactactgtcagtcttatgatagcaccatcacggtgttcggcggagggaccaagctgaccgtcctaggttctagaggtggtggtggtagcggcggcggcggctctggtggtggtggatccctcgagatggcccaggtccagctggtacagtctggggctgaggtgaagaagcctgggtcctcggtgaaggtctcctgcaaggcttctggaggcaccttcagcagctatgctatcagctgggtgcgacaggcccctggacaagggcttgagtggatgggagggatcatccctatctttggtacagcaaactacgcacagaagttccagggcagagtcacgattaccgcggacgaatccacgagcacagcctacatggagctgagcagcctgagatctgaggacacggccgtgtattactgtgcgggggagggttactatgatagtagtggttattccaacggtgatgcttttgatatctggggccaagggacaatggtcaccgtctcttcaactagtggccaggccggccagcaccatcaccatcaccatggcgcatacccgtacgacgttccggactacgcttct

SEQ ID NO: 850 - protein, 283 aa, synthetic construct
  REGION 1..283: note = Description of Artificial Sequence: Synthetic polypeptide
QAVLTQPHSVSESPGKTVTISCTRSSGSIASNYVQWYQQRPGSAPTTVIYEDNQRPSGVPDRFSGSIDSSSNSASLTISGLKTEDEADYYCQSYDSTITVFGGGTKLTVLGSRGGGGSGGGGSGGGGSLEMAQVQLVQSGAEVKKPGSSVKVSCKASGGTFSSYAISWVRQAPGQGLEWMGGIIPIFGTANYAQKFQGRVTITADESTSTAYMELSSLRSEDTAVYYCAGEGYYDSSGYSNGDAFDIWGQGTMVTVSSTSGQAGQHHHHHHGAYPYDVPDYAS

SEQ ID NO: 851 - DNA, 819 bp, synthetic construct
  misc_feature 1..819: note = Description of Artificial Sequence: Synthetic polynucleotide
  source 1..819: mol_type = other DNA
aattttatgctgactcagccccactctgtgtcggagtctccggggaagacggtaaccatctcctgcacccgcagcagtggcagcattgccagcaactatgtgcagtggtaccagcagcgcccgggcagtgcccccaccactgtgatctatgaggataaccaaagaccctctggggtccctgatcggttctctggctccatcgacagctcctccaactctgcctccctcaccatctctggactgaagactgaggacgaggctgactactactgtcagtcttatgatagcagcaatgtggtattcggcggagggaccaaggtcaccgtcctaggttctagaggtggtggtggtagcggcggcggcggctctggtggtggtggatccctcgagatggccgaggtgcagctggtggagtctgggggaggcttggtacagcctggagggtccctgagactctcctgtgcagcctctggattcaccttcagtagttatgaaatgaactgggtccgccaggctccagggaaggggctggagtgggtttcatacattagtagtagtggtagtaccatatactacgcagactctgtgaagggccgattcaccatctccagagacaacgccaagaactcactgtatctgcaaatgaacagcctgagagccgaggacacggctgtttattactgtgcacgctgggactacggtatggacgtctggggccaagggaccacggtcaccgtctcctcaactagtggccaggccggccagcaccatcaccatcaccatggcgcatacccgtacgacgttccggactacgcttct

SEQ ID NO: 852 - protein, 273 aa, synthetic construct
  REGION 1..273: note = Description of Artificial Sequence: Synthetic polypeptide
NFMLTQPHSVSESPGKTVTISCTRSSGSIASNYVQWYQQRPGSAPTTVIYEDNQRPSGVPDRFSGSIDSSSNSASLTISGLKTEDEADYYCQSYDSSNVVFGGGTKVTVLGSRGGGGSGGGGSGGGGSLEMAEVQLVESGGGLVQPGGSLRLSCAASGFTFSSYEMNWVRQAPGKGLEWVSYISSSGSTIYYADSVKGRFTISRDNAKNSLYLQMNSLRAEDTAVYYCARWDYGMDVWGQGTTVTVSSTSGQAGQHHHHHHGAYPYDVPDYAS

SEQ ID NO: 853 - DNA, 828 bp, synthetic construct
  misc_feature 1..828: note = Description of Artificial Sequence: Synthetic polynucleotide
  source 1..828: mol_type = other DNA
tcctatgtgctgactcagccaccctcagtgtccgtgtccccaggacagacagccagcatcacctgctctggagatagattgacgaataaatatgtttcctggtatcaacagaagccaggccagtcccctgtgttggtcatctatgaggatgccaagcggccctcagggatccctgcgcgattctctggctccaactctgggaacacagccactctgaccatcagcgggacccaggctatggatgagtctgaatattactgtcaggcgtgggacagcagtgtggtggtttttggcggagggaccaagctgaccgtcctaggttctagaggtggtggtggtagcggcggcggcggctctggtggtggtggatccctcgagatggccgaggtgcagctggtggagtctgggggaggcttggtacagcctggcaggtccctgagactctcctgtgcagcctctggatttacctttgatgattatgccatgcactgggtccggcaagctccagggaagggcctggagtgggtctcaggtattagttggaatagtggtagtataggctatgcggactctgtgaagggccgattcaccatctccagagacaacgccaagaactccctgtatctgcaaatgaacagtctgagagatgaggacacggccttgtattactgtgcaaaagaccgaggggggggagttatcgttaaggatgcttttgatatctggggccaagggacaatggtcaccgtctcttcaactagtggccaggccggccagcaccatcaccatcaccatggcgcatacccgtacgacgttccggactacgcttct

SEQ ID NO: 854 - protein, 276 aa, synthetic construct
  REGION 1..276: note = Description of Artificial Sequence: Synthetic polypeptide
SYVLTQPPSVSVSPGQTASITCSGDRLTNKYVSWYQQKPGQSPVLVIYEDAKRPSGIPARFSGSNSGNTATLTISGTQAMDESEYYCQAWDSSVVVFGGGTKLTVLGSRGGGGSGGGGSGGGGSLEMAEVQLVESGGGLVQPGRSLRLSCAASGFTFDDYAMHWVRQAPGKGLEWVSGISWNSGSIGYADSVKGRFTISRDNAKNSLYLQMNSLRDEDTALYYCAKDRGGGVIVKDAFDIWGQGTMVTVSSTSGQAGQHHHHHHGAYPYDVPDYAS

SEQ ID NO: 855 - DNA, 825 bp, synthetic construct
  misc_feature 1..825: note = Description of Artificial Sequence: Synthetic polynucleotide
  source 1..825: mol_type = other DNA
tcctatgagctgactcagccacccgcagcgtctgggacccccggacagagagtcaccatctcttgttctgggggcgtctccaacatcgggagtggtgctctaaattggtaccagcaactcccaggaacggcccccaaactcctcatctatagttacaatcagcggccctcaggggtctctgaccgattctctggctccaggtctgccacctcagcctccctggccatcagtgggctccagtctgaggatgaggctgattattactgtgcaacctgggatgatagtgtgaatggttgggtgttcggcggagggaccaagctgaccgtcctaggttctagaggtggtggtggtagcggcggcggcggctctggtggtggtggatccctcgagatggccgaggtgcagctggtggagtctggagctgaggtgaagaagcctggggattcagtgaaggtctcctgcaagccttctggttacaattttctcaactatggtatcaactgggtgcgacaggcccctggacaagggcttgagtggatgggatggattagcacttacaccggtaacacaaactatgcacagaagctgcagggcagagtcaccttcaccacagacacatccacgagcacagcctacatggagatgaggagcctgagatctgacgacacggccgtgtattactgtgcgcgccagcagggtggtggttggtacgatgtttggggtcaaggtactctggtcaccgtctcctcaactagtggccaggccggccagcaccatcaccatcaccatggcgcatacccgtacgacgttccggactacgcttct

SEQ ID NO: 856 - protein, 275 aa, synthetic construct
  REGION 1..275: note = Description of Artificial Sequence: Synthetic polypeptide
SYELTQPPAASGTPGQRVTISCSGGVSNIGSGALNWYQQLPGTAPKLLIYSYNQRPSGVSDRFSGSRSATSASLAISGLQSEDEADYYCATWDDSVNGWVFGGGTKLTVLGSRGGGGSGGGGSGGGGSLEMAEVQLVESGAEVKKPGDSVKVSCKPSGYNFLNYGINWVRQAPGQGLEWMGWISTYTGNTNYAQKLQGRVTFTTDTSTSTAYMEMRSLRSDDTAVYYCARQQGGGWYDVWGQGTLVTVSSTSGQAGQHHHHHHGAYPYDVPDYAS

SEQ ID NO: 857 - DNA, 843 bp, synthetic construct
  misc_feature 1..843: note = Description of Artificial Sequence: Synthetic polynucleotide
  source 1..843: mol_type = other DNA
cagtctgtcgtgacgcagccgccctcagtgtctgcggccccaggagagaaggtcaccatctcctgctctggaagcaacttcaatgttggaaataatgatgtatcctggtatcagcaactcccaggtgcagcccccaaactcctcatttatgacaataataagcgaccctcagggattcctgaccgattctctggctccaagtctggcacgtcagccaccctggacatcaccgggctccacagtgacgacgaggccgattattactgcggaacatgggatagcagcctgaatactgggggggtcttcggaactgggaccaaggtcaccgtcctaggttctagaggtggtggtggtagcggcggcggcggctctggtggtggtggatccctcgagatggccgaggtccagctggtgcagtctggagctgaggtgaagaagcctggggcctcagtgaaggtctcctgcaaggcttctggttacacctttaccagctatactatcagctgggtacgacaggcccctggacaagggcttgagtggatgggatggatcagcacttacaatggtctcacaaactatgcacagaacctccagggcagagtcaccatgactacagacacattcacgaccacagcctacatggagctgaggagcctcagatctgacgacacggccgtgtattactgtgtgagagaggggtcccccgactacggtgacttcgcgtcctttgactactggggccagggaaccctggtcaccgtctcctcaactagtggccaggccggccagcaccatcaccatcaccatggcgcatacccgtacgacgttccggactacgcttct

SEQ ID NO: 858 - protein, 281 aa, synthetic construct
  REGION 1..281: note = Description of Artificial Sequence: Synthetic polypeptide
QSVVTQPPSVSAAPGEKVTISCSGSNFNVGNNDVSWYQQLPGAAPKLLIYDNNKRPSGIPDRFSGSKSGTSATLDITGLHSDDEADYYCGTWDSSLNTGGVFGTGTKVTVLGSRGGGGSGGGGSGGGGSLEMAEVQLVQSGAEVKKPGASVKVSCKASGYTFTSYTISWVRQAPGQGLEWMGWISTYNGLTNYAQNLQGRVTMTTDTFTTTAYMELRSLRSDDTAVYYCVREGSPDYGDFASFDYWGQGTLVTVSSTSGQAGQHHHHHHGAYPYDVPDYAS

SEQ ID NO: 859 - DNA, 843 bp, synthetic construct
  misc_feature 1..843: note = Description of Artificial Sequence: Synthetic polynucleotide
  source 1..843: mol_type = other DNA
cagtctgtgttgacgcagccgccctcagtgtctgcgcccccgggacagaaggtcaccatctcctgctctggaagcagctccaacattgggaataattatgtatcctggtaccagcagttcccaggaacagcccccaaactcctcatttatgacaataataagcgaccctcagggatttctgaccgattctctggctccaagtctggcacgtcagccaccctgggcatcgccggactccagactggggacgaggccgattattactgcggaacatgggataccagcctgagtggtttttatgtcttcggaagtgggaccaaggtcaccgtcctaggttctagaggtggtggtggtagcggcggcggcggctctggtggtggtggatccctcgagatggccgaggtccagctggtacagtctggagctgaggtgaagaagcctggggcctcagtgaaggtctcctgcaaggcttctggttacacctttaccagctatactatcagctgggtacgacaggcccctggacaagggcttgagtggatgggatggatcagcacttacaatggtctcacaaactatgcacagaacctccagggcagagtcaccatgactacagacacattcacgaccacagcctacatggagctgaggagcctcagatctgacgacacggccgtgtattactgtgtgagagaggggtcccccgactacggtgacttcgcgtcctttgactactggggccagggaaccctggtcaccgtctcctcaactagtggccaggccggccagcaccatcaccatcaccatggcgcatacccgtacgacgttccggactacgcttct

SEQ ID NO: 860 - protein, 281 aa, synthetic construct
  REGION 1..281: note = Description of Artificial Sequence: Synthetic polypeptide
QSVLTQPPSVSAPPGQKVTISCSGSSSNIGNNYVSWYQQFPGTAPKLLIYDNNKRPSGISDRFSGSKSGTSATLGIAGLQTGDEADYYCGTWDTSLSGFYVFGSGTKVTVLGSRGGGGSGGGGSGGGGSLEMAEVQLVQSGAEVKKPGASVKVSCKASGYTFTSYTISWVRQAPGQGLEWMGWISTYNGLTNYAQNLQGRVTMTTDTFTTTAYMELRSLRSDDTAVYYCVREGSPDYGDFASFDYWGQGTLVTVSSTSGQAGQHHHHHHGAYPYDVPDYAS

SEQ ID NO: 861 - DNA, 840 bp, synthetic construct
  misc_feature 1..840: note = Description of Artificial Sequence: Synthetic polynucleotide
  source 1..840: mol_type = other DNA
ctgcctgtgctgactcagccaccctcagcgtctgcgacccccgggcagagggtcaccatctcttgttctggaaccacctccaacatcggaagtaatactgtacactggtaccagcagctcccagggacggcccccaaactcctcatctataataataatcagcggccctcaggggtccctgaccgattctctggctccaagtctggcacctcagcctccctggccatcagtgggctccggtccgaggatgaggctacatattcctgtgcaacatgggatgacagcctgagtggtgtggtcttcggcggagggaccaagctgaccgtcctaggttctagaggtggtggtggtagcggcggcggcggctctggtggtggtggatccctcgagatggccgaggtccagctggtgcagtctggggctgaggtgaagaagcctgggtcctcggtgaaggtctcctgcaaggcttctggaggcaccttcagcagctatgctatcagctgggtgcgacaggcccctggacaagggcttgagtggatgggagggatcatccctatctttggtacagcaaactacgcacagaagttccagggcagagtcacgattaccgcggacgaatccacgagcacagcctacatggagctgagcagcctgagatctgaggacacggccgtgtattactgtgcgagagatcccgcctacggtgactacgagtatgatgcttttgatatctggggccaagggacaatggtcaccgtctcttcaactagtggccaggccggccagcaccatcaccatcaccatggcgcatacccgtacgacgttccggactacgcttct

SEQ ID NO: 862 - protein, 280 aa, synthetic construct
  REGION 1..280: note = Description of Artificial Sequence: Synthetic polypeptide
LPVLTQPPSASATPGQRVTISCSGTTSNIGSNTVHWYQQLPGTAPKLLIYNNNQRPSGVPDRFSGSKSGTSASLAISGLRSEDEATYSCATWDDSLSGVVFGGGTKLTVLGSRGGGGSGGGGSGGGGSLEMAEVQLVQSGAEVKKPGSSVKVSCKASGGTFSSYAISWVRQAPGQGLEWMGGIIPIFGTANYAQKFQGRVTITADESTSTAYMELSSLRSEDTAVYYCARDPAYGDYEYDAFDIWGQGTMVTVSSTSGQAGQHHHHHHGAYPYDVPDYAS

SEQ ID NO: 863 - DNA, 825 bp, synthetic construct
  misc_feature 1..825: note = Description of Artificial Sequence: Synthetic polynucleotide
  source 1..825: mol_type = other DNA
cagtctgtgttgacgcagccgccctcagcgtctgggacccccgggcagagggtcaccatctcttgttctggaagcagctccaacatcggaactaatggtgtaaactggttccagcagttcccaggaacggcccccaaactcctcatctatactaatgatcagcggccctcaggggtccctgaccgattctctggctccaagtctggcacctcagcctccctggccatcagtgggctccagtctgcggatgaggctgattattactgtgcagtgtgggaccacagcctgaatggtccggtgttcggcggagggaccaagctgaccgtcctaggttctagaggtggtggtggtagcggcggcggcggctctggtggtggtggatccctcgagatggcccaggtgcagctggtgcagtctggggctgaggtgaagaagcctgggtcctcggtgaaggtctcctgcaaggcttctggaggcaccttcagcagctatgctatcagctgggtgcgacaggcccctggacaagggcttgagtggatgggagggatcatccctatctttggtacagcaaactacgcacagaagttccagggcagagtcacgattaccgcggacgaatccacgagcacagcctacatggagctgagcagcctgagatctgaggacacggccgtgtattactgtgcgagaggggccggttttgatgcttttgatatctggggccaagggacaatggtcaccgtctcttcaactagtggccaggccggccagcaccatcaccatcaccatggcgcatacccgtacgacgttccggactacgcttct

SEQ ID NO: 864 - protein, 275 aa, synthetic construct
  REGION 1..275: note = Description of Artificial Sequence: Synthetic polypeptide
QSVLTQPPSASGTPGQRVTISCSGSSSNIGTNGVNWFQQFPGTAPKLLIYTNDQRPSGVPDRFSGSKSGTSASLAISGLQSADEADYYCAVWDHSLNGPVFGGGTKLTVLGSRGGGGSGGGGSGGGGSLEMAQVQLVQSGAEVKKPGSSVKVSCKASGGTFSSYAISWVRQAPGQGLEWMGGIIPIFGTANYAQKFQGRVTITADESTSTAYMELSSLRSEDTAVYYCARGAGFDAFDIWGQGTMVTVSSTSGQAGQHHHHHHGAYPYDVPDYAS

SEQ ID NO: 865 - DNA, 819 bp, synthetic construct
  misc_feature 1..819: note = Description of Artificial Sequence: Synthetic polynucleotide
  source 1..819: mol_type = other DNA
caggctgtgctgactcagccaccctcagcgtctgggacccccgggcagagggtcaccatctcttgttctggaagcagctccaacatcggaagtaatactgtaaactggtaccagcagctcccaggaacggcccccaaactcctcatctatagtaataatcagcggccctcaggggtccctgaccgattctctggctccaagtctggcacctcagcctccctggccatcagtgggctccagtctgaggatgagactgattattactgtgcagcatgggatgacagcctgaatggttatgtcttcggaactgggaccaaggtcaccgtcctaggttctagaggtggtggtggtagcggcggcggcggctctggtggtggtggatccctcgagatggcccaggtgcagctacagcagtggggcgcaggactgttgaagccttcggagaccctgtccctcacctgcgctgtctatggtgggtccttcagtggttactactggagctggatccgccagcccccagggaaggggctggagtggattggggaaatcaatcatagtggaagcaccaactacaacccgtccctcaagagtcgagtcaccatatcagtagacacgtccaagaaccagttctccctgaagctgagctctgtgaccgccgcggacacggctgtgtattactgtgcgagagaggggctagatgcttttgatatctggggccaagggacaatggtcaccgtctcttcaactagtggccaggccggccagcaccatcaccatcaccatggcgcatacccgtacgacgttccggactacgcttct

SEQ ID NO: 866 - protein, 273 aa, synthetic construct
  REGION 1..273: note = Description of Artificial Sequence: Synthetic polypeptide
QAVLTQPPSASGTPGQRVTISCSGSSSNIGSNTVNWYQQLPGTAPKLLIYSNNQRPSGVPDRFSGSKSGTSASLAISGLQSEDETDYYCAAWDDSLNGYVFGTGTKVTVLGSRGGGGSGGGGSGGGGSLEMAQVQLQQWGAGLLKPSETLSLTCAVYGGSFSGYYWSWIRQPPGKGLEWIGEINHSGSTNYNPSLKSRVTISVDTSKNQFSLKLSSVTAADTAVYYCAREGLDAFDIWGQGTMVTVSSTSGQAGQHHHHHHGAYPYDVPDYAS

SEQ ID NO: 867 - DNA, 819 bp, synthetic construct
  misc_feature 1..819: note = Description of Artificial Sequence: Synthetic polynucleotide
  source 1..819: mol_type = other DNA
caggctgtgctgactcagccaccctcagcgtctgggacccccgggcagagggtcaccatctcttgttctggaagcagctccaacatcggaagtaatactgtaaactggtaccagcagctcccaggaacggcccccaaactcctcatgtatagtaatgatcagcggccctcaggggtccctgaccgattctctggctccaagtctggcacctcagcctccctggccatcagtgggctccagtctgaggatgaggctgattattattgtgcagcatgggatgacagcctgaatggttatgtcttcgcagctgggacccagctcaccgttttaagttctagaggtggtggtggtagcggcggcggcggctctggtggtggtggatccctcgagatggcccaggtgcagctacagcagtggggcgcaggactgttgaagccttcggagaccctgtccctcacctgcgctgtctatggtgggtccttcagtggttactactggagctggatccgccagcccccagggaaggggctggagtggattggggaaatcaatcatagtggaagcaccaactacaacccgtccctcaagagtcgagtcaccatatcagtagacacgtccaagaaccagttctccctgaagctgagctctgtgaccgccgcggacacggctgtgtattactgtgcgagagaggggctagatgcttttgatatctggggccaagggacaatggtcaccgtctcttcaactagtggccaggccggccagcaccatcaccatcaccatggcgcatacccgtacgacgttccggactacgcttct

SEQ ID NO: 868 - protein, 273 aa, synthetic construct
  REGION 1..273: note = Description of Artificial Sequence: Synthetic polypeptide
QAVLTQPPSASGTPGQRVTISCSGSSSNIGSNTVNWYQQLPGTAPKLLMYSNDQRPSGVPDRFSGSKSGTSASLAISGLQSEDEADYYCAAWDDSLNGYVFAAGTQLTVLSSRGGGGSGGGGSGGGGSLEMAQVQLQQWGAGLLKPSETLSLTCAVYGGSFSGYYWSWIRQPPGKGLEWIGEINHSGSTNYNPSLKSRVTISVDTSKNQFSLKLSSVTAADTAVYYCAREGLDAFDIWGQGTMVTVSSTSGQAGQHHHHHHGAYPYDVPDYAS

SEQ ID NO: 869 - DNA, 843 bp, synthetic construct
  misc_feature 1..843: note = Description of Artificial Sequence: Synthetic polynucleotide
  source 1..843: mol_type = other DNA
cagtctgtcgtgacgcagccgccctcagtgtctgcggccccaggacagaaggtcaccatctcctgctctggaagcagctccaacattgggaataattatgtatcctggtaccagcagctcccaggaacagcccccaaactcctcatttatgacaataataagcgaccctcagggattcctgaccgattctctggctccaagtctggcacgtcagccaccctgggcatcactggactccagactggggacgaggccgattattactgcggaacatgggatagcagcctgagtgctgcttatgtcttcggaactgggaccaaggtcaccgtcctaggttctagaggtggtggtggtagcggcggcggcggctctggtggtggtggatccctcgagatggcccaggtccagctggtacagtctggagctgaggtgaagaagcctggggcctcagtgaaggtctcctgcaaggcttctggttacagctttaccagctatactatcagctgggttcgacaggcccctggacaaggccttgagtggatgggatgggtcagcacttacaatggtctcagaaactatgcacagaacctccagggcagagtcaccatgactacagacacactcacgaccacagcctacatggagctgaggagcctcagatctgacgacacggccgtgtattattgtgtgagagaggggtcccccgactacggtgacttcgcggcctttgactactggggccagggcaccctggtcaccgtctcctcaactagtggccaggccggccagcaccatcaccatcaccatggcgcatacccgtacgacgttccggactacgcttct

SEQ ID NO: 870 - protein, 281 aa, synthetic construct
  REGION 1..281: note = Description of Artificial Sequence: Synthetic polypeptide
QSVVTQPPSVSAAPGQKVTISCSGSSSNIGNNYVSWYQQLPGTAPKLLIYDNNKRPSGIPDRFSGSKSGTSATLGITGLQTGDEADYYCGTWDSSLSAAYVFGTGTKVTVLGSRGGGGSGGGGSGGGGSLEMAQVQLVQSGAEVKKPGASVKVSCKASGYSFTSYTISWVRQAPGQGLEWMGWVSTYNGLRNYAQNLQGRVTMTTDTLTTTAYMELRSLRSDDTAVYYCVREGSPDYGDFAAFDYWGQGTLVTVSSTSGQAGQHHHHHHGAYPYDVPDYAS

SEQ ID NO: 871 - DNA, 816 bp, synthetic construct
  misc_feature 1..816: note = Description of Artificial Sequence: Synthetic polynucleotide
  source 1..816: mol_type = other DNA
caggctgtgctgactcagccaccctcagcgtctgagacccccgggcagagggtcaccatctcttgttctggaagcaggtccaacatcggaactaatattgtacactggtaccagcagcgcccaggaatggcccccaaactcctcacttatggtagtcggcggccctcaggggtcccggaccgattctctggctccaagtttggcacctcagcctccctggccatcagtgggctccagtctgaggatgaggctgattattattgtgcagcatgggatgacagtctgaatggtccggctttcggcggagggaccaagctgaccgtcctaggttctagaggtggtggtggtagcggcggcggcggctctggtggtggtggatccctcgagatggcccaggtgcagctacagcagtggggcgcaggactgttgaagccttcggagaccctgtccctcacctgcgctgtctatggtgggtccttcagtggttactactggagctggatccgccagcccccagggaaggggctggagtggattggggaaatcaatcatagtggaagcaccaactacaacccgtccctcaagagtcgagtcaccatatcagtagacacgtccaagaaccagttctccctgaagctgagctctgtgaccgccgcggacacggctgtgtattactgtgcgagagacggtgggggctactttgactactggggccagggaaccctggtcaccgtctcctcaactagtggccaggccggccagcaccatcaccatcaccatggcgcatacccgtacgacgttccggactacgcttct

SEQ ID NO: 872 - protein, 272 aa, synthetic construct
  REGION 1..272: note = Description of Artificial Sequence: Synthetic polypeptide
QAVLTQPPSASETPGQRVTISCSGSRSNIGTNIVHWYQQRPGMAPKLLTYGSRRPSGVPDRFSGSKFGTSASLAISGLQSEDEADYYCAAWDDSLNGPAFGGGTKLTVLGSRGGGGSGGGGSGGGGSLEMAQVQLQQWGAGLLKPSETLSLTCAVYGGSFSGYYWSWIRQPPGKGLEWIGEINHSGSTNYNPSLKSRVTISVDTSKNQFSLKLSSVTAADTAVYYCARDGGGYFDYWGQGTLVTVSSTSGQAGQHHHHHHGAYPYDVPDYAS

SEQ ID NO: 873 - DNA, 837 bp, synthetic construct
  misc_feature 1..837: note = Description of Artificial Sequence: Synthetic polynucleotide
  source 1..837: mol_type = other DNA
cagtctgtgttgacgcagccgccctcagtgtctggggccccagggcagagggtcaccatctcctgcactgggagcagctccaatatcggggcacgttatgatgtacactggtaccagcaactcccaggaacagccccccgactcctcatctctgctaactacgatcggccctcaggggtccctgaccgattctctggctccaagtctggcacctcagcctccctggccatcactgggctccaggctgaggatgaggctgattattactgccagtcctatgacagcagtgtgagtgcttgggtgttcggcggagggaccaaggtcaccgtcctaggttctagaggtggtggtggtagcggcggcggcggctctggtggtggtggatccctcgagatggccgaagtgcagctggtgcagtctggggctgaagtgaaggagcctggggcctcagtgaggatctcctgccaggcatctggatacaacttcatcagttattatatgcactgggtgcggcaggcccctgggcaaggtcttgagtggatgggcaccatcaacccaggcagtggtgagacagactactcacagaagttgcagggcagagtcaccatgaccagggacccgtccacgggtacattcgacatggggctgagcagcctgacatctggggacacggccgtctattattgtgcgacaggtctcatcagaggagctagcgatgcttttaatatctggggccgggggacaatggtcaccgtctcttcaactagtggccaggccggccagcaccatcaccatcaccatggcgcatacccgtacgacgttccggactacgcttct

SEQ ID NO: 874 - protein, 279 aa, synthetic construct
  REGION 1..279: note = Description of Artificial Sequence: Synthetic polypeptide
QSVLTQPPSVSGAPGQRVTISCTGSSSNIGARYDVHWYQQLPGTAPRLLISANYDRPSGVPDRFSGSKSGTSASLAITGLQAEDEADYYCQSYDSSVSAWVFGGGTKVTVLGSRGGGGSGGGGSGGGGSLEMAEVQLVQSGAEVKEPGASVRISCQASGYNFISYYMHWVRQAPGQGLEWMGTINPGSGETDYSQKLQGRVTMTRDPSTGTFDMGLSSLTSGDTAVYYCATGLIRGASDAFNIWGRGTMVTVSSTSGQAGQHHHHHHGAYPYDVPDYAS

SEQ ID NO: 875 - DNA, 825 bp, synthetic construct
  misc_feature 1..825: note = Description of Artificial Sequence: Synthetic polynucleotide
  source 1..825: mol_type = other DNA
cagcctgtgctgactcagccaccctcagtgtccgtgtccccaggacagacggccgccatcccctgttctggagataagttgggggataaatttgcttcctggtatcagcagaagccaggccagtcccctgtgctggtcatctatcaagatactaagcggccctcagggatccctgagcgattctctggctccaactctgggaacacagccactctgaccatcagcgggacccaggctatggatgaggctgactattactgtcagacgtgggccagcggcattgtggtgttcggcggagggaccaagctgaccgtcctaggttctagaggtggtggtggtagcggcggcggcggctctggtggtggtggatccctcgagatggcccaggtacagctgcagcagtcaggtccaggactggtgaagccctcgcagaccctctcactcacctgtgccatctccggggacagtgtctctagcaacagtgctgcttggaactggatcaggcagtccccatcgagaggccttgagtggctgggaaggacatactacaggtccaagtggtataatgattatgcagtatctgtgaaaagtcgaataaccatcaacccagacacatccaagaaccagttctccctgcagctgaactctgtgactcccgaggacacggctgtgtattactgtgcaagagagcgcagtggctggaagggatttgactactggggccagggaaccctggtcaccgtctcctcaactagtggccaggccggccagcaccatcaccatcaccatggcgcatacccgtacgacgttccggactacgcttct

SEQ ID NO: 876 - protein, 275 aa, synthetic construct
  REGION 1..275: note = Description of Artificial Sequence: Synthetic polypeptide
QPVLTQPPSVSVSPGQTAAIPCSGDKLGDKFASWYQQKPGQSPVLVIYQDTKRPSGIPERFSGSNSGNTATLTISGTQAMDEADYYCQTWASGIVVFGGGTKLTVLGSRGGGGSGGGGSGGGGSLEMAQVQLQQSGPGLVKPSQTLSLTCAISGDSVSSNSAAWNWIRQSPSRGLEWLGRTYYRSKWYNDYAVSVKSRITINPDTSKNQFSLQLNSVTPEDTAVYYCARERSGWKGFDYWGQGTLVTVSSTSGQAGQHHHHHHGAYPYDVPDYAS

SEQ ID NO: 877 - DNA, 834 bp, synthetic construct
  misc_feature 1..834: note = Description of Artificial Sequence: Synthetic polynucleotide
  source 1..834: mol_type = other DNA
gatgttgtgatgactcagtctccaccctccctgtccgtcacccctggagagccggcctccatcacctgcaggtctagtcagagcctcctggaaagaaatgcatacaactacttggattggtacctgcagaggccaggacagtctccacagctcctgatctacttgggttctaatcgggccgccggggtccctgacaggttcagtggcagtggatcaggcagagattttacactgaaaatcagcagagtggagcctgaggatgttggggtttattactgcatgcaagctctacaagctccgttcactttcggcggagggaccaaggtggagatcaaacgttctagaggtggtggtggtagcggcggcggcggctctggtggtggtggatccctcgagatggccgaagtgcagctggtgcagtctgggggaggcttggtacagcctggggggtccctgagactctcctgtgcagcctctggattcacctttagcagctatgccatgagctgggtccgccaggctccagggaaggggctggagtgggtctcagctattagtggtagtggtggtagcacatactacgcagactccgtgaagggccggttcaccatctccagagacaattccaagaacacgctgtatctgcaaatgaacagcctgagagccgaggacacggccgtatattactgtgcgaaatggggcccgtttcaggatgcttttgatatctggggccaagggacaatggtcaccgtctcttcaactagtggccaggccggccagcaccatcaccatcaccatggcgcatacccgtacgacgttccggactacgcttct

SEQ ID NO: 878 - protein, 278 aa, synthetic construct
  REGION 1..278: note = Description of Artificial Sequence: Synthetic polypeptide
DVVMTQSPPSLSVTPGEPASITCRSSQSLLERNAYNYLDWYLQRPGQSPQLLIYLGSNRAAGVPDRFSGSGSGRDFTLKISRVEPEDVGVYYCMQALQAPFTFGGGTKVEIKRSRGGGGSGGGGSGGGGSLEMAEVQLVQSGGGLVQPGGSLRLSCAASGFTFSSYAMSWVRQAPGKGLEWVSAISGSGGSTYYADSVKGRFTISRDNSKNTLYLQMNSLRAEDTAVYYCAKWGPFQDAFDIWGQGTMVTVSSTSGQAGQHHHHHHGAYPYDVPDYAS

SEQ ID NO: 879 - DNA, 843 bp, synthetic construct
  misc_feature 1..843: note = Description of Artificial Sequence: Synthetic polynucleotide
  source 1..843: mol_type = other DNA
caggctgtgctgactcagcctgcctccgtgtctgggtctcctggacagtcgatcaccatctcctgcactggaaccagcagtgacgttggtggttataactatgtctcctggtaccaacagcacccgggcaaagcccccaaactcatgatttatgaggtcagtaatcggccctcaggggtttctaatcgcttctctggctccaagtctggcaacacggcctccctgaccatctctgggctccaggctgaggacgaggctgattattactgcagctcatatacaagcagcagcaccccttatgtcttcggagcagggaccaaggtcaccgtcctaggttctagaggtggtggtggtagcggcggcggcggctctggtggtggtggatccctcgagatggccgaggtgcagctggtggagtctgggggaggcttggtacagcctggcaggtccctgagactctcctgtgcagcctctggattcacctttgatgattatgccatgcactgggtccggcaagctccagggaagggcctggagtgggtctcaggtattagttggaatagtggtagcataggctatgcggactctgtgaagggccgattcaccatctccagagacaacgccaagaactccctgtatctgcaaatgaacagtctgagagctgaggacacggccttgtattactgtgcaaaagccaggtggacagcagtggcatcagaccaccactttgactactggggccagggaacgctggtcaccgtctcctcaactagtggccaggccggccagcaccatcaccatcaccatggcgcatacccgtacgacgttccggactacgcttct

SEQ ID NO: 880 - protein, 281 aa, synthetic construct
  REGION 1..281: note = Description of Artificial Sequence: Synthetic polypeptide
QAVLTQPASVSGSPGQSITISCTGTSSDVGGYNYVSWYQQHPGKAPKLMIYEVSNRPSGVSNRFSGSKSGNTASLTISGLQAEDEADYYCSSYTSSSTPYVFGAGTKVTVLGSRGGGGSGGGGSGGGGSLEMAEVQLVESGGGLVQPGRSLRLSCAASGFTFDDYAMHWVRQAPGKGLEWVSGISWNSGSIGYADSVKGRFTISRDNAKNSLYLQMNSLRAEDTALYYCAKARWTAVASDHHFDYWGQGTLVTVSSTSGQAGQHHHHHHGAYPYDVPDYAS

SEQ ID NO: 881 - DNA, 819 bp, synthetic construct
  misc_feature 1..819: note = Description of Artificial Sequence: Synthetic polynucleotide
  source 1..819: mol_type = other DNA
caggctgtgcttactcagccaccctcagcgtctgggacccccgggcagagggtcaccatctcttgttctggaagcagctccaacatcggaagtaatactgtaaactggtaccagcagctcccaggaacggcccccaaactcctcatctatagtaataatcagcggccctcaggggtccctgaccgattctctggctccaagtctggcacctcagcctccctggccatcagtgggctccagtctgaggatgaggctgattattactgtgcagcatgggatgacagcctgaatggttatgtcttcggaactgggaccaagctgaccgtcctaggttctagaggtggtggtggtagcggcggcggcggctctggtggtggtggatccctcgagatggccgaggtgcagctggtgcagtctggggctgaggtgaagaagcctgggtcctcggtgaaggtctcctgcaaggcttctggaggcaccttcagcagctatgctatcagctgggtgcgacaggcccctggacaagggcttgagtggatgggagggatcatccctatctttggtacagcaaactacgcacagaagttccagggcagagtcacgattaccgcggacgaatccacgagcacagcctacatggagctgagcagcctgagatctgaggacacggccgtgtattactgtgcgagagattgggactacatggacgtctggggcaaagggaccacggtcaccgtctcctcaactagtggccaggccggccagcaccatcaccatcaccatggcgcatacccgtacgacgttccggactacgcttct

SEQ ID NO: 882 - protein, 273 aa, synthetic construct
  REGION 1..273: note = Description of Artificial Sequence: Synthetic polypeptide
QAVLTQPPSASGTPGQRVTISCSGSSSNIGSNTVNWYQQLPGTAPKLLIYSNNQRPSGVPDRFSGSKSGTSASLAISGLQSEDEADYYCAAWDDSLNGYVFGTGTKLTVLGSRGGGGSGGGGSGGGGSLEMAEVQLVQSGAEVKKPGSSVKVSCKASGGTFSSYAISWVRQAPGQGLEWMGGIIPIFGTANYAQKFQGRVTITADESTSTAYMELSSLRSEDTAVYYCARDWDYMDVWGKGTTVTVSSTSGQAGQHHHHHHGAYPYDVPDYAS

SEQ ID NO: 883 - DNA, 852 bp, synthetic construct
  misc_feature 1..852: note = Description of Artificial Sequence: Synthetic polynucleotide
  source 1..852: mol_type = other DNA
tcctatgagctgactcagccaccctcagcgtctgggacccccgggcagagggtcaccatctcttgttctggaagcagctccaacatcggaagtaatactgtaaactggtaccagcagctcccaggaacggcccccaaactcctcatctatagtaataatcagcggccctcaggggtccctgaccgattctctggctccaagtctggcacctcagcctccctggccatcagtgggctccagtctgaggatgaggctgattattactgtgcagcatgggatgacagcctgaatggttatgtcttcggaactgggaccaaggtcaccgtcctaggttctagaggtggtggtggtagcggcggcggcggctctggtggtggtggatccctcgagatggccgaggtgcagctggtggagtctggagctgaggtgaagaagcctggggcctcagtgaaggtctcctgcaaggcttctggttacacctttaccagctatggtatcagctgggtgcgacaggcccctggacaagggcttgagtggatgggatggatcagcgcttacaatggtaacacaaactatgcacagaagctccagggcagagtcaccatgaccacagacacatccacgagcacagcctacatggagctgaggagcctgagatctgacgacacggccgtgtattactgtgcgagagacctatctcggggagctaacccgcattactactactactacggtatggacgtctggggccaagggaccacggtcaccgtctcctcaactagtggccaggccggccagcaccatcaccatcaccatggcgcatacccgtacgacgttccggactacgcttct

SEQ ID NO: 884 - protein, 284 aa, synthetic construct
  REGION 1..284: note = Description of Artificial Sequence: Synthetic polypeptide
SYELTQPPSASGTPGQRVTISCSGSSSNIGSNTVNWYQQLPGTAPKLLIYSNNQRPSGVPDRFSGSKSGTSASLAISGLQSEDEADYYCAAWDDSLNGYVFGTGTKVTVLGSRGGGGSGGGGSGGGGSLEMAEVQLVESGAEVKKPGASVKVSCKASGYTFTSYGISWVRQAPGQGLEWMGWISAYNGNTNYAQKLQGRVTMTTDTSTSTAYMELRSLRSDDTAVYYCARDLSRGANPHYYYYYGMDVWGQGTTVTVSSTSGQAGQHHHHHHGAYPYDVPDYAS

SEQ ID NO: 885 - DNA, 855 bp, synthetic construct
  misc_feature 1..855: note = Description of Artificial Sequence: Synthetic polynucleotide
  source 1..855: mol_type = other DNA
cagtctgtgttgacgcagccgccctcagtgtctggggccccagggcagagggtcaccgtctcctgcactgggagcagatccaacatcggggcaggatatgatgtacactggtaccagcaacttccaggaacagcccccaaactcctcatctatggaaatagtaatcggcctccaggggtccctgaccgattctctgggtctaagtctggcacctcagcctccctggtcatcactgggctccaggctgaggatgccgctgattattactgccagtcctatgacaacactgtgcgtgaatcaccttatgtcttcggaactgggaccaaggtcaccgtcctaggttctagaggtggtggtggtagcggcggcggcggctctggtggtggtggatccctcgagatggccgaggtccagctggtacagtctggggctgaggtgaagaagcctggggcctcagtgaaggtctcctgcaaggtttccggatacaccctcactgaattatccatgcactgggtgcgacaggctcctggaaaagggcttgagtggatgggaggttttgatcctgaagatggtgaaacaatctacgcacagaagttccagggcagagtcaccatgaccgaggacacatctacagacacagcctacatggagctgagcagcctgagatctgaggacacggccgtgtattactgtgcaacagagagtaatttagtgtcccggcactactactactacggtatggacgtctggggccaagggaccacggtcaccgtctcctcaactagtggccaggccggccagcaccatcaccatcaccatggcgcatacccgtacgacgttccggactacgcttct

SEQ ID NO: 886 - protein, 285 aa, synthetic construct
  REGION 1..285: note = Description of Artificial Sequence: Synthetic polypeptide
QSVLTQPPSVSGAPGQRVTVSCTGSRSNIGAGYDVHWYQQLPGTAPKLLIYGNSNRPPGVPDRFSGSKSGTSASLVITGLQAEDAADYYCQSYDNTVRESPYVFGTGTKVTVLGSRGGGGSGGGGSGGGGSLEMAEVQLVQSGAEVKKPGASVKVSCKVSGYTLTELSMHWVRQAPGKGLEWMGGFDPEDGETIYAQKFQGRVTMTEDTSTDTAYMELSSLRSEDTAVYYCATESNLVSRHYYYYGMDVWGQGTTVTVSSTSGQAGQHHHHHHGAYPYDVPDYAS

SEQ ID NO: 887 - DNA, 867 bp, synthetic construct
  misc_feature 1..867: note = Description of Artificial Sequence: Synthetic polynucleotide
  source 1..867: mol_type = other DNA
ctgcctgtgctgactcagccaccctcagcgtctgggacccccgggcagagggtcaccatctcttgttctggaaccagctccaacatcggaagtaattctgtagactggtaccagcagctcccaggaacggcccccaaactcctcatctatagtaataatcagcggccctcaggggtccctgaccgaatctctggctccaagtctggcacctcagcctccctggccatcagtgggctccagtctgaggatgaggctgattattactgtgcagcatgggatgacagcctgaatggttatgtcttcggaactgggaccaaggtcaccgtcctaggttctagaggtggtggtggtagcggcggcggcggctctggtggtggtggatccctcgagatggccgaagtgcagctggtgcagtctggggctgaggtgaagaagcctggggcctcagtgaaggtctcctgcaaggcttctggatacaccttcaccggctactatatgcactgggtgcgacaggcccctggacaagggcttgagtggatgggatggatcaaccctaacagtggtggcacaaactatgcacagaagtttcagggcagggtcaccatgaccagggacacgtccatcagcacagcctacatggagctgagcaggctgagatctgacgacacggccgtgtattactgtgcgagagattacggatactatggttcggggagttattcgagcggccccctttactactactacggtatggacgtctggggccaagggaccacggtcaccgtctcctcaactagtggccaggccggccagcaccatcaccatcaccatggcgcatacccgtacgacgttccggactacgcttct

SEQ ID NO: 888 - protein, 289 aa, synthetic construct
  REGION 1..289: note = Description of Artificial Sequence: Synthetic polypeptide
LPVLTQPPSASGTPGQRVTISCSGTSSNIGSNSVDWYQQLPGTAPKLLIYSNNQRPSGVPDRISGSKSGTSASLAISGLQSEDEADYYCAAWDDSLNGYVFGTGTKVTVLGSRGGGGSGGGGSGGGGSLEMAEVQLVQSGAEVKKPGASVKVSCKASGYTFTGYYMHWVRQAPGQGLEWMGWINPNSGGTNYAQKFQGRVTMTRDTSISTAYMELSRLRSDDTAVYYCARDYGYYGSGSYSSGPLYYYYGMDVWGQGTTVTVSSTSGQAGQHHHHHHGAYPYDVPDYAS

SEQ ID NO: 889 - DNA, 852 bp, synthetic construct
  misc_feature 1..852: note = Description of Artificial Sequence: Synthetic polynucleotide
  source 1..852: mol_type = other DNA
caggctgtgctgactcagccaccctcagcgtctgggacccccgggcagagggtcaccatctcttgttctggaagcagctccaacatcggaagtaatactgtaaactggtaccagcagctcccaggaacggcccccaaactcctcatgtataataatgatcagcggccctcaggggtccctgaccgattctctggctccaagtctggcacctcagcctccctggccatcagtgggctccagtctgaggatgaggctgattattactgtgcagcatgggatgacagcctcaatggttatgtcttcggacctgggaccaaggtcaccgtcctaggttctagaggtggtggtggtagcggcggcggcggctctggtggtggtggatccctcgagatggcccaggtgcagctggtggagtctggagctgaggtgaagaagcctggggcctcagtgaaggtctcctgcaaggcttctggttacacctttaccagctatggtatcagctgggtgcgacaggcccctggacaagggcttgagtggatgggatggatcagcgcttacaatggtaacacaaactatgcacagaagctccagggcagagtcaccatgaccacagacacatccacgagcacagcctacatggagctgaggagcctgagatctgacgacacggccgtgtattactgtgcgagagacctatctcggggagctaacccgcattactactactactacggtatggacgtctggggccaagggaccacggtcaccgtctcctcaactagtggccaggccggccagcaccatcaccatcaccatggcgcatacccgtacgacgttccggactacgcttct

SEQ ID NO: 890 - protein, 284 aa, synthetic construct
  REGION 1..284: note = Description of Artificial Sequence: Synthetic polypeptide
QAVLTQPPSASGTPGQRVTISCSGSSSNIGSNTVNWYQQLPGTAPKLLMYNNDQRPSGVPDRFSGSKSGTSASLAISGLQSEDEADYYCAAWDDSLNGYVFGPGTKVTVLGSRGGGGSGGGGSGGGGSLEMAQVQLVESGAEVKKPGASVKVSCKASGYTFTSYGISWVRQAPGQGLEWMGWISAYNGNTNYAQKLQGRVTMTTDTSTSTAYMELRSLRSDDTAVYYCARDLSRGANPHYYYYYGMDVWGQGTTVTVSSTSGQAGQHHHHHHGAYPYDVPDYAS

SEQ ID NO: 891 - DNA, 831 bp, synthetic construct
  misc_feature 1..831: note = Description of Artificial Sequence: Synthetic polynucleotide
  source 1..831: mol_type = other DNA
aattttatgctgactcagccccacgctgtgtcggagtctccggggaagacggtaaccatctcctgcacccgcagcagtggcagtattgccagcaactatgtgcagtggtaccagcagcgcccgggcagttccccccgcactgtgatttatgaggataatcaaagaccctctggggtccctggtcggttctctggctccatcgacagctcctccaactctgcctccctcaccatctctggactgaagactgaggacgaggctgactactactgtcagtcttatgattccaccagtgtgcttttcggcggagggaccaagctgaccgtcctaggttctagaggtggtggtggtagcggcggcggcggctctggtggtggtggatccctcgagatggccgaggtccagctggtgcagtctggggctgaggtgaagaagccagggtcctcggtgaaggtctcctgcaaggcctcgggaggcaccttcagcagcaattctctcagctgggtgcgacaggcccctggacaagggcttgagtggatgggaaggatcttccctatcctgggtataacaaactatgcacagaagttccagggcagagtcacgattaccgcggacaaatccacgagcacagcctacatggagctgagcagcctgagatctgaggacacggccgtctattactgtgcgagaggaaactaccaatggtatgatgcttttgatatctggggccaagggacaatggtcaccgtctcttcaactagtggccaggccggccagcaccatcaccatcaccatggcgcatacccgtacgacgttccggactacgcttct

SEQ ID NO: 892 - protein, 277 aa, synthetic construct
  REGION 1..277: note = Description of Artificial Sequence: Synthetic polypeptide
NFMLTQPHAVSESPGKTVTISCTRSSGSIASNYVQWYQQRPGSSPRTVIYEDNQRPSGVPGRFSGSIDSSSNSASLTISGLKTEDEADYYCQSYDSTSVLFGGGTKLTVLGSRGGGGSGGGGSGGGGSLEMAEVQLVQSGAEVKKPGSSVKVSCKASGGTFSSNSLSWVRQAPGQGLEWMGRIFPILGITNYAQKFQGRVTITADKSTSTAYMELSSLRSEDTAVYYCARGNYQWYDAFDIWGQGTMVTVSSTSGQAGQHHHHHHGAYPYDVPDYAS

SEQ ID NO: 893 - DNA, 819 bp, synthetic construct
  misc_feature 1..819: note = Description of Artificial Sequence: Synthetic polynucleotide
  source 1..819: mol_type = other DNA
cagcctgtgctgactcagccaccctcagtgtcagtggtcccaggaaagacggccaggattacctgtgggggaaaaaacattggaagtaaaagtgtgcactggtaccagcagaagccaggccaggcccctgtggtggtcatccattatgatagtgaccggccctcagggatccctgagcgattctctggctccaactctgggaacacggccaccctgaccatcagcagggtcgaagccggggatgaggccgactattactgtcaggtgtgggatagtagtagtgatcatccttatgtcttcggaactgggaccaaggtcaccgtcctaggttctagaggtggtggtggtagcggcggcggcggctctggtggtggtggatccctcgagatggcccaggtgcagctggtgcagtctggagctgaggtgaagaagcctggggcctcagtgaaggtctcctgcaaggcttctggttacacctttaccaactatggtatcagctgggtgcgacaggcccctggacaagggcttgagtggatgggatggatcagcgcttacaatggtaacacaaactatgcacataagctccagggcagagtcaccatgaccacagacacatccacgagcacagccaacatggagctgaggagcctgagacctgacgacactgccgtgtattactgtgcgcgctcttacttcggttctcatgattactggggtcaaggtactctggtgaccgtctcctcaactagtggccaggccggccagcaccatcaccatcaccatggcgcatacccgtacgacgttccggactacgcttct

SEQ ID NO: 894 - protein, 273 aa, synthetic construct
  REGION 1..273: note = Description of Artificial Sequence: Synthetic polypeptide
QPVLTQPPSVSVVPGKTARITCGGKNIGSKSVHWYQQKPGQAPVVVIHYDSDRPSGIPERFSGSNSGNTATLTISRVEAGDEADYYCQVWDSSSDHPYVFGTGTKVTVLGSRGGGGSGGGGSGGGGSLEMAQVQLVQSGAEVKKPGASVKVSCKASGYTFTNYGISWVRQAPGQGLEWMGWISAYNGNTNYAHKLQGRVTMTTDTSTSTANMELRSLRPDDTAVYYCARSYFGSHDYWGQGTLVTVSSTSGQAGQHHHHHHGAYPYDVPDYAS

SEQ ID NO: 895 - DNA, 834 bp, synthetic construct
  misc_feature 1..834: note = Description of Artificial Sequence: Synthetic polynucleotide
  source 1..834: mol_type = other DNA
tcctatgtgctgactcagccaccctcggtgtcagtggccccaggaaagacggccaggatttcctgtgggggaaacgacattggaagtaaaagtgttttctggtatcagcagaggccaggccaggcccctgtgttggtcgtctatgatgatagcgaccggccctcagggctccctgagcgattctctggcttcaactctgggaacacggccaccctgaccatcagcagggtcgaagccggggatgaggccgactattactgtcaagtgtgggatagtagtagtgatcattatgtcttcggaactgggaccaaggtcaccgtcctaggttctagaggtggtggtggtagcggcggcggcggctctggtggtggtggatccctcgagatggcccaggtgcagctggtggagtctgggggaggcttggtacagcctggcaggtccctgagactctcctgtgcagcctctggattcacctttgatgattatgccatgcactgggtccggcaagctccagggaagggcctggagtgggtctcaggtattagttggaatagtggtagcataggctatgcggactctgtgaagggccgattcaccatctccagagacaacgccaagaactccctgtatctgcaaatgaacagtctgagagctgaggacacggccttgtattactgtgcaaaagatataacctatggttcggggagttatggtgcttttgatatctggggccaagggacaatggtcaccgtctcttcaactagtggccaggccggccagcaccatcaccatcaccatggcgcatacccgtacgacgttccggactacgcttct

SEQ ID NO: 896 - protein, 278 aa, synthetic construct
  REGION 1..278: note = Description of Artificial Sequence: Synthetic polypeptide
SYVLTQPPSVSVAPGKTARISCGGNDIGSKSVFWYQQRPGQAPVLVVYDDSDRPSGLPERFSGFNSGNTATLTISRVEAGDEADYYCQVWDSSSDHYVFGTGTKVTVLGSRGGGGSGGGGSGGGGSLEMAQVQLVESGGGLVQPGRSLRLSCAASGFTFDDYAMHWVRQAPGKGLEWVSGISWNSGSIGYADSVKGRFTISRDNAKNSLYLQMNSLRAEDTALYYCAKDITYGSGSYGAFDIWGQGTMVTVSSTSGQAGQHHHHHHGAYPYDVPDYAS

SEQ ID NO: 897 - protein, 15 aa, synthetic construct
  REGION 1..15: note = Description of Artificial Sequence: Synthetic peptide
GGGGSGGGGSGGGGS

SEQ ID NO: 898 - DNA, 45 bp, synthetic construct
  misc_feature 1..45: note = Description of Artificial Sequence: Synthetic oligonucleotide
  source 1..45: mol_type = other DNA
ggtggaggtggatcaggtggaggtggatctggtggaggtggatct

SEQ ID NO: 899 - protein, 977 aa, Homo sapiens [sequence omitted]

SEQ ID NO: 900 - protein, 87 aa, Homo sapiens
RPVLTLRAPGTHAAVGDLLELHCEALRGSPLILYRFFHEDVTLGNRSSPSGGASLNLSLTAEHSGNYSCEADNGLGAQRSETVTLYI

SEQ ID NO: 901 - protein, 5 aa, synthetic construct
  REGION 1..5: note = Description of Artificial Sequence: Synthetic peptide
GGGGS

SEQ ID NO: 902 - protein, 7 aa, synthetic construct
  REGION 1..7: note = Description of Artificial Sequence: Synthetic peptide
SGGSGGS

SEQ ID NO: 903 - protein, 9 aa, synthetic construct
  REGION 1..9: note = Description of Artificial Sequence: Synthetic peptide
GGGGSGGGS

SEQ ID NO: 904 - protein, 10 aa, synthetic construct
  REGION 1..10: note = Description of Artificial Sequence: Synthetic peptide
GGGGSGGGGS

SEQ ID NO: 905 - protein, 18 aa, synthetic construct
  REGION 1..18: note = Description of Artificial Sequence: Synthetic peptide
GGGGSGGGGSGGGGGGGS

SEQ ID NO: 906 - protein, 20 aa, synthetic construct
  REGION 1..20: note = Description of Artificial Sequence: Synthetic peptide
GGGGSGGGGSGGGGSGGGGS

SEQ ID NO: 907 - protein, 25 aa, synthetic construct
  REGION 1..25: note = Description of Artificial Sequence: Synthetic peptide
GGGGSGGGGSGGGGSGGGGSGGGGS

SEQ ID NO: 908 - protein, 30 aa, synthetic construct
  REGION 1..30: note = Description of Artificial Sequence: Synthetic polypeptide
GGGGSGGGGSGGGGSGGGGSGGGGSGGGGS

SEQ ID NO: 909 - protein, 35 aa, synthetic construct
  REGION 1..35: note = Description of Artificial Sequence: Synthetic polypeptide
GGGGSGGGGSGGGGSGGGGSGGGGSGGGGSGGGGS

SEQ ID NO: 910 - protein, 15 aa, synthetic construct
  REGION 1..15: note = Description of Artificial Sequence: Synthetic peptide
EPKSCDKTHTCPPCP

SEQ ID NO: 911 - protein, 24 aa, synthetic construct
  REGION 1..24: note = Description of Artificial Sequence: Synthetic peptide
GGGGSGGGSEPKSCDKTHTCPPCP

SEQ ID NO: 912 - protein, 62 aa, synthetic construct
  REGION 1..62: note = Description of Artificial Sequence: Synthetic polypeptide
ELKTPLGDTTHTCPRCPEPKSCDTPPPCPRCPEPKSCDTPPPCPRCPEPKSCDTPPPCPRCP

SEQ ID NO: 913 - protein, 6 aa, synthetic construct
  REGION 1..6: note = Description of Artificial Sequence: Synthetic peptide
GSGSGS

SEQ ID NO: 914 - skipped

SEQ ID NO: 915 - protein, 116 aa, synthetic construct
  REGION 1..116: note = Description of Artificial Sequence: Synthetic polypeptide
VKLQESGGGLVQPGGSRKLSCAASGFTFSIFGLHWVRQAPEKGLEWVAYISGDSNTIYYADTVKGRFTISRDNPKNTLFLQMTSLRSEDTAMYYCARNSYYALDYWGQGTTVTVSS

SEQ ID NO: 916 - DNA, 348 bp, synthetic construct
  misc_feature 1..348: note = Description of Artificial Sequence: Synthetic polynucleotide
  source 1..348: mol_type = other DNA
gtgaagctgcaggagtctgggggaggcttagtgcagcctggagggtcccggaaactctcctgtgcagcctctggattcactttcagtatctttggattgcactgggttcgtcaggctccagagaaggggctggagtgggtcgcatacattagtggtgacagtaataccatctactatgcagacacagtgaagggccgattcaccatctccagagacaatcccaagaacaccctgttcctgcaaatgaccagtctaaggtctgaggacacggccatgtattactgtgcaagaaatagctactatgctctggactactggggccaagggaccacggtcaccgtctcctca

SEQ ID NO: 917 - protein, 107 aa, synthetic construct
  REGION 1..107: note = Description of Artificial Sequence: Synthetic polypeptide
DIELTQSPAIMSVSPGEKVTMTCRASSSVSSSYLHWYQQRSGASPKIWIYSTSNLASGVPARFSGSGTGTSYSLTISSVEAEDAATYYCQQYSGYPWTFGGGTKLEI

SEQ ID NO: 918 - DNA, 321 bp, synthetic construct
  misc_feature 1..321: note = Description of Artificial Sequence: Synthetic polynucleotide
  source 1..321: mol_type = other DNA
gacattgagctcacccagtctccagcaatcatgtctgtatctccaggtgaaaaggtcaccatgacctgcagggccagctcaagtgtcagttccagttacttgcactggtaccagcagaggtcaggtgcctcccccaaaatctggatttatagcacatccaacttggcttctggagtccctgctcgcttcagtggcagtgggactgggacctcttactctctcacaatcagcagtgtggaggctgaagatgctgccacttattactgccagcagtacagtggttacccgtggacgttcggtggagggaccaagctggagatc

SEQ ID NO: 919 - protein, 119 aa, synthetic construct
  REGION 1..119: note = Description of Artificial Sequence: Synthetic polypeptide
VQLQESGGGLVQPGGSRKLSCTASGFTFSSFGMHWVRQAPEKGLEWVAYISSGSNNIYFADTVKGRFTISRDNPKNTLFLQMTSLRSEDTAMYYCARSEYYGSSHMDYWGQGTTVTVSS

SEQ ID NO: 920 - DNA, 357 bp, synthetic construct
  misc_feature 1..357: note = Description of Artificial Sequence: Synthetic polynucleotide
  source 1..357: mol_type = other DNA
gtccaactgcaggagtcagggggaggcttagtgcagcctggagggtcccggaaactctcctgtacagcctctggattcactttcagtagctttggaatgcactgggttcgtcaggctccagagaaggggctggagtgggtcgcatacattagtagtggcagtaataacatctactttgcggacacagtgaagggccgattcaccatctccagagacaatcccaagaacaccctgttcctgcaaatgaccagtctaaggtctgaggacacggccatgtattactgtgcaagatcggaatactacggtagtagccatatggactactggggccaagggaccacggtcaccgtctcctca

SEQ ID NO: 921 - protein, 106 aa, synthetic construct
  REGION 1..106: note = Description of Artificial Sequence: Synthetic polypeptide
DIELTQSPKFMSTSVGDRVSVTCKASQNVGTNVAWYQQKPGQSPKPLIYSATYRNSGVPDRFTGSGSGTDFTLTITNVQSKDLADYFCQQYNRYPYTSGGGTKLEI

SEQ ID NO: 922 - DNA, 318 bp, synthetic construct
  misc_feature 1..318: note = Description of Artificial Sequence: Synthetic polynucleotide
  source 1..318: mol_type = other DNA
gacattgagctcacccagtctccaaaattcatgtccacatcagtaggagacagggtcagcgtcacctgcaaggccagtcagaatgtgggtactaatgtagcctggtatcaacagaaaccaggacaatctcctaaaccactgatttactcggcaacctaccggaacagtggagtccctgatcgcttcacaggcagtggatctgggacagatttcactctcaccatcactaacgtgcagtctaaagacttggcagactatttctgtcaacaatataacaggtatccgtacacgtccggaggggggaccaagctggagatc

SEQ ID NO: 923 - protein, 5 aa, synthetic construct
  REGION 1..5: note = Description of Artificial Sequence: Synthetic peptide
IFGLH

SEQ ID NO: 924 - protein, 17 aa, synthetic construct
  REGION 1..17: note = Description of Artificial Sequence: Synthetic peptide
YISGDSNTIYYADTVKG

SEQ ID NO: 925 - protein, 8 aa, synthetic construct
  REGION 1..8: note = Description of Artificial Sequence: Synthetic peptide
NSYYALDY

SEQ ID NO: 926 - protein, 12 aa, synthetic construct
  REGION 1..12: note = Description of Artificial Sequence: Synthetic peptide
RASSSVSSSYLH

SEQ ID NO: 927 - protein, 7 aa, synthetic construct
  REGION 1..7: note = Description of Artificial Sequence: Synthetic peptide
STSNLAS

SEQ ID NO: 928 - protein, 9 aa, synthetic construct
  REGION 1..9: note = Description of Artificial Sequence: Synthetic peptide
QQYSGYPWT

SEQ ID NO: 929 - protein, 5 aa, synthetic construct
  REGION 1..5: note = Description of Artificial Sequence: Synthetic peptide
SFGMH

SEQ ID NO: 930 - protein, 17 aa, synthetic construct
  REGION 1..17: note = Description of Artificial Sequence: Synthetic peptide
YISSGSNNIYFADTVKG

SEQ ID NO: 931 - protein, 11 aa, synthetic construct
  REGION 1..11: note = Description of Artificial Sequence: Synthetic peptide
SEYYGSSHMDY

SEQ ID NO: 932 - protein, 11 aa, synthetic construct
  REGION 1..11: note = Description of Artificial Sequence: Synthetic peptide
KASQNVGTNVA

SEQ ID NO: 933 - protein, 7 aa, synthetic construct
  REGION 1..7: note = Description of Artificial Sequence: Synthetic peptide
SATYRNS

SEQ ID NO: 934 - protein, 9 aa, synthetic construct
  REGION 1..9: note = Description of Artificial Sequence: Synthetic peptide
QQYNRYPYT

SEQ ID NO: 935 - protein, 20 aa, synthetic construct
  REGION 1..20: note = Description of Artificial Sequence: Synthetic peptide
MALPVTALLLPLALLLHAAR

SEQ ID NO: 936 - DNA, 60 bp, synthetic construct
  misc_feature 1..60: note = Description of Artificial Sequence: Synthetic oligonucleotide
  source 1..60: mol_type = other DNA
atggctctcccagtgactgccctactgcttcccctagcgcttctcctgcatgcagctcgt

SEQ ID NO: 937 - protein, 20 aa, synthetic construct
  REGION 1..20: note = Description of Artificial Sequence: Synthetic peptide
METDTLLLWVLLLWVPGSTG

SEQ ID NO: 938 - DNA, 60 bp, synthetic construct
  misc_feature 1..60: note = Description of Artificial Sequence: Synthetic oligonucleotide
  source 1..60: mol_type = other DNA
atggaaaccgacaccctgctgctgtgggtgctgctgctgtgggtgccaggatccacagga

SEQ ID NO: 939 - protein, 220 aa, Homo sapiens
MLRLLLALNLFPSIQVTGNKILVKQSPMLVAYDNAVNLSCKYSYNLFSREFRASLHKGLDSAVEVCVVYGNYSQQLQVYSKTGFNCDGKLGNESVTFYLQNLYVNQTDIYFCKIEVMYPPPYLDNEKSNGTIIHVKGKHLCPSPLFPGPSKPFWVLVVVGGVLACYSLLVTVAFIIFWVRSKRSRLLHSDYMNMTPRRPGPTRKHYQPYAPPRDFAAYRS

SEQ ID NO: 940 - DNA, 321 bp, Homo sapiens
  source 1..321: mol_type = unassigned DNA
attgaagttatgtatcctcctccttacctagacaatgagaagagcaatggaaccattatccatgtgaaagggaaacacctttgtccaagtcccctatttcccggaccttctaagcccttttgggtgctggtggtggttggtggagtcctggcttgctatagcttgctagtaacagtggcctttattattttctgggtgaggagtaagaggagcaggctcctgcacagtgactacatgaacatgactccccgccgccccgggcccacccgcaagcattaccagccctatgccccaccacgcgacttcgcagcctatcgctcc

SEQ ID NO: 941 - protein, 163 aa, Homo sapiens
MKWKALFTAAILQAQLPITEAQSFGLLDPKLCYLLDGILFIYGVILTALFLRVKFSRSADAPAYQQGQNQLYNELNLGRREEYDVLDKRRGRDPEMGGKPRRKNPQEGLYNELQKDKMAEAYSEIGMKGERRRGKGHDGLYQGLSTATKDTYDALHMQALPPR

SEQ ID NO: 942 - DNA, 339 bp, Homo sapiens
  source 1..339: mol_type = unassigned DNA
agagtgaagttcagcaggagcgcagacgcccccgcgtaccagcagggccagaaccagctctataacgagctcaatctaggacgaagagaggagtacgatgttttggacaagagacgtggccgggaccctgagatggggggaaagccgagaaggaagaaccctcaggaaggcctgtacaatgaactgcagaaagataagatggcggaggcctacagtgagattgggatgaaaggcgagcgccggaggggcaaggggcacgatggcctttaccagggtctcagtacagccaccaaggacacctacgacgcccttcacatgcaggccctgccccctcgctaa

SEQ ID NO: 943 - protein, 255 aa, Homo sapiens
MGNSCYNIVATLLLVLNFERTRSLQDPCSNCPAGTFCDNNRNQICSPCPPNSFSSAGGQRTCDICRQCKGVFRTRKECSSTSNAECDCTPGFHCLGAGCSMCEQDCKQGQELTKKGCKDCCFGTFNDQKRGICRPWTNCSLDGKSVLVNGTKERDVVCGPSPADLSPGASSVTPPAPAREPGHSPQIISFFLALTSTALLFLLFFLTLRFSVVKRGRKKLLYIFKQPFMRPVQTTQEEDGCSCRFPEEEEGGCEL

SEQ ID NO: 944 - protein, 277 aa, Homo sapiens
MCVGARRLGRGPCAALLLLGLGLSTVTGLHCVGDTYPSNDRCCHECRPGNGMVSRCSRSQNTVCRPCGPGFYNDVVSSKPCKPCTWCNLRSGSERKQLCTATQDTVCRCRAGTQPLDSYKPGVDCAPCPPGHFSPGDNQACKPWTNCTLAGKHTLQPASNSSDAICEDRDPPATQPQETQGPPARPITVQPTEAWPRTSQGPSTRPVEVPGGRAVAAILGLGLVLGLLGPLAILLALYLLRRDQRLPPDAHKPPGGGSFRTPIQEEQADAHSTLAKI

SEQ ID NO: 945 - protein, 199 aa, Homo sapiens
MKSGLWYFFLFCLRIKVLTGEINGSANYEMFIFHNGGVQILCKYPDIVQQFKMQLLKGGQILCDLTKTKGSGNTVSIKSLKFCHSQLSNNSVSFFLYNLDHSHANYYFCNLSIFDPPPFKVTLTGGYLHIYESQLCCQLKFWLPIGCAAFVVVCILGCILICWLTKKKYSSSVHDPNGEYMFMRAVNTAKKSRLTDVTL

SEQ ID NO: 946 - protein, 223 aa, Homo sapiens
MACLGFQRHKAQLNLATRTWPCTLLFFLLFIPVFCKAMHVAQPAVVLASSRGIASFVCEYASPGKATEVRVTVLRQADSQVTEVCAATYMMGNELTFLDDSICTGTSSGNQVNLTIQGLRAMDTGLYICKVELMYPPPYYLGIGNGTQIYVIDPEPCPDSDFLLWILAAVSSGLFFYSFLLTAVSLSKMLKKRSPLTTGVYVKMPPTEPECEKQFQPYFIPIN

SEQ ID NO: 947 - protein, 288 aa, Homo sapiens
MQIPQAPWPVVWAVLQLGWRPGWFLDSPDRPWNPPTFSPALLVVTEGDNATFTCSFSNTSESFVLNWYRMSPSNQTDKLAAFPEDRSQPGQDCRFRVTQLPNGRDFHMSVVRARRNDSGTYLCGAISLAPKAQIKESLRAELRVTERRAEVPTAHPSPSPRPAGQFQTLVVGVVGGLLGSLVLLVWVLAVICSRAARGTIGARRTGQPLKEDPSAVPVFSVDYGELDFQWREKTPEPPVPCVPEQTEYATIVFPSGMGTSSPARRGSADGPRSAQPLRPEDGHCSWPL

SEQ ID NO: 948 - protein, 525 aa, Homo sapiens
MWEAQFLGLLFLQPLWVAPVKPLQPGAEVPVVWAQEGAPAQLPCSPTIPLQDLSLLRRAGVTWQHQPDSGPPAAAPGHPLAPGPHPAAPSSWGPRPRRYTVLSVGPGGLRSGRLPLQPRVQLDERGRQRGDFSLWLRPARRADAGEYRAAVHLRDRALSCRLRLRLGQASMTASPPGSLRASDWVILNCSFSRPDRPASVHWFRNRGQGRVPVRESPHHHLAESFLFLPQVSPMDSGPWGCILTYRDGFNVSIMYNLTVLGLEPPTPLTVYAGAGSRVGLPCRLPAGVGTRSFLTAKWTPPGGGPDLLVTGDNGDFTLRLEDVSQAQAGTYTCHIHLQEQQLNATVTLAIITVTPKSFGSPGSLGKLLCEVTPVSGQERFVWSSLDTPSQRSFSGPWLEAQEAQLLSQPWQCQLYQGERLLGAAVYFTELSSPGAQRSGRAPGALPAGHLLLFLILGVLSLLLLVTGAFGFHLWRRQWRPRRFSALEQGIHPPQAQSKIEELEQEPEPEPEPEPEPEPEPEPEQL

SEQ ID NO: 949 - protein, 370 aa, Homo sapiens
MLGQVVTLILLLLLKVYQGKGCQGSADHVVSISGVPLQLQPNSIQTKVDSIAWKKLLPSQNGFHHILKWENGSLPSNTSNDRFSFIVKNLSLLIKAAQQQDSGLYCLEVTSISGKVQTATFQVFVFESLLPDKVEKPRLQGQGKILDRGRCQVALSCLVSRDGNVSYAWYRGSKLIQTAGNLTYLDEEVDINGTHTYTCNVSNPVSWESHTLNLTQDCQNAHQEFRFWPFLVIIVILSALFLGTLACFCVWRRKRKEKQSETSPKEFLTIYEDVKDLKTRRNHEQEQTFPGGGSTIYSMIQSQSSAPTSQEPAYTLYSLIQPSRKSGSRKRNHSPSFNSTIYEVIGKSQPKAQNPARLSRKELENFDVYS

SEQ ID NO: 950 - protein, 289 aa, Homo sapiens
MKTLPAMLGTGKLFWVFFLIPYLDIWNIHGKESCDVQLYIKRQSEHSILAGDPFELECPVKYCANRPHVTWCKLNGTTCVKLEDRQTSWKEEKNISFFILHFEPVLPNDNGSYRCSANFQSNLIESHSTTLYVTDVKSASERPSKDEMASRPWLLYRLLPLGGLPLLITTCFCLFCCLRRHQGKQNELSDTAGREINLVDAHLKSEQTEASTRQNSQVLLSETGIYDNDPDLCFRMQEGSEVYSNPCLEENKPGIVYASLNHSVIGPNSRLARNVKEAPTEYASICVRS

SEQ ID NO: 951 - DNA, 1473 bp, synthetic construct
  misc_feature 1..1473: note = Description of Artificial Sequence: Synthetic polynucleotide
  source 1..1473: mol_type = other DNA
atggctctcccagtgactgccctactgcttcccctagcgcttctcctgcatgcagctcgtgtgaagctgcaggagtctgggggaggcttagtgcagcctggagggtcccggaaactctcctgtgcagcctctggattcactttcagtatctttggattgcactgggttcgtcaggctccagagaaggggctggagtgggtcgcatacattagtggtgacagtaataccatctactatgcagacacagtgaagggccgattcaccatctccagagacaatcccaagaacaccctgttcctgcaaatgaccagtctaaggtctgaggacacggccatgtattactgtgcaagaaatagctactatgctctggactactggggccaagggaccacggtcaccgtctcctcaggtggaggtggatcaggtggaggtggatctggtggaggtggatctgacattgagctcacccagtctccagcaatcatgtctgtatctccaggtgaaaaggtcaccatgacctgcagggccagctcaagtgtcagttccagttacttgcactggtaccagcagaggtcaggtgcctcccccaaaatctggatttatagcacatccaacttggcttctggagtccctgctcgcttcagtggcagtgggactgggacctcttactctctcacaatcagcagtgtggaggctgaagatgctgccacttattactgccagcagtacagtggttacccgtggacgttcggtggagggaccaagctggagatcgaacaaaaactcatctcagaagaggatctggcggccgcaattgaagttatgtatcctcctccttacctagacaatgagaagagcaatggaaccattatccatgtgaaagggaaacacctttgtccaagtcccctatttcccggaccttctaagcccttttgggtgctggtggtggttggtggagtcctggcttgctatagcttgctagtaacagtggcctttattattttctgggtgaggagtaagaggagcaggctcctgcacagtgactacatgaacatgactccccgccgccccgggcccacccgcaagcattaccagccctatgccccaccacgcgacttcgcagcctatcgctccagagtgaagttcagcaggagcgcagacgcccccgcgtaccagcagggccagaaccagctctataacgagctcaatctaggacgaagagaggagtacgatgttttggacaagagacgtggccgggaccctgagatggggggaaagccgagaaggaagaaccctcaggaaggcctgtacaatgaactgcagaaagataagatggcggaggcctacagtgagattgggatgaaaggcgagcgccggaggggcaaggggcacgatggcctttaccagggtctcagtacagccaccaaggacacctacgacgcccttcacatgcaggccctgccccctcgctaa

SEQ ID NO: 952 - DNA, 1482 bp, synthetic construct
  misc_feature 1..1482: note = Description of Artificial Sequence: Synthetic polynucleotide
  source 1..1482: mol_type = other DNA
atggagacagacacactcctgctatgggtactgctgctctgggttccaggttccactggtgacgtccaactgcaggagtcagggggaggcttagtgcagcctggagggtcccggaaactctcctgtacagcctctggattcactttcagtagctttggaatgcactgggttcgtcaggctccagagaaggggctggagtgggtcgcatacattagtagtggcagtaataacatctactttgcggacacagtgaagggccgattcaccatctccagagacaatcccaagaacaccctgttcctgcaaatgaccagtctaaggtctgaggacacggccatgtattactgtgcaagatcggaatactacggtagtagccatatggactactggggccaagggaccacggtcaccgtctcctcaggtggaggtggatcaggtggaggtggatctggtggaggtggatctgacattgagctcacccagtctccaaaattcatgtccacatcagtaggagacagggtcagcgtcacctgcaaggccagtcagaatgtgggtactaatgtagcctggtatcaacagaaaccaggacaatctcctaaaccactgatttactcggcaacctaccggaacagtggagtccctgatcgcttcacaggcagtggatctgggacagatttcactctcaccatcactaacgtgcagtctaaagacttggcagactatttctgtcaacaatataacaggtatccgtacacgtccggaggggggaccaagctggagatcgaacaaaaactcatctcagaagaggatctggcggccgcaattgaagttatgtatcctcctccttacctagacaatgagaagagcaatggaaccattatccatgtgaaagggaaacacctttgtccaagtcccctatttcccggaccttctaagcccttttgggtgctggtggtggttggtggagtcctggcttgctatagcttgctagtaacagtggcctttattattttctgggtgaggagtaagaggagcaggctcctgcacagtgactacatgaacatgactccccgccgccccgggcccacccgcaagcattaccagccctatgccccaccacgcgacttcgcagcctatcgctccagagtgaagttcagcaggagcgcagacgcccccgcgtaccagcagggccagaaccagctctataacgagctcaatctaggacgaagagaggagtacgatgttttggacaagagacgtggccgggaccctgagatggggggaaagccgagaaggaagaaccctcaggaaggcctgtacaatgaactgcagaaagataagatggcggaggcctacagtgagattgggatgaaaggcgagcgccggaggggcaaggggcacgatggcctttaccagggtctcagtacagccaccaaggacacctacgacgcccttcacatgcaggccctgccccctcgctaa

SEQ ID NO: 953 - DNA, 7833 bp, synthetic construct
  misc_feature 1..7833: note = Description of Artificial Sequence: Synthetic polynucleotide
  source 1..7833: mol_type = other DNA
ccggtggtacctcacccttaccgagtcggcgacacagtgtgggtccgccgacaccagactaagaacctagaacctcgctggaaaggaccttacacagtcctgctgaccacccccaccgccctcaaagtagacggcatcgcagcttggatacacgccgcccacgtgaaggctgccgaccccgggggtggaccatcctctagactgccatggaaaccgatacactgctgctgtgggtgctgctgctgtgggtgccaggatccacaggctcctatgtgctgactcagccaccctcagtgtcagtggccccaggaaagacggccaggattacctgtgggggaaacaacattggaagtaaaagtgtgcactggtaccagcagaagccaggccaggcccctgtgctggtcatctattatgatagcgaccggccctcagggatccctgagcgattctctggctccaactctgggaacacggccaccctgaccatcagcagggtcgaagccggggatgaggccgactattactgtcaggtgtgggatagtagtagtgattatgtcttcggaactgggaccaaggtcaccgtcctaggttctagaggtggtggtggtagcggcggcggcggctctggtggtggtggatccctcgagatggccgaggtgcagctggtggagactgggggaggcttggtcaagcctggagggtccctgagactctcctgtgcagcctctggattcaccgtcagtgactactacatgagctggatccgccaggctccagggaagggcctggagtggatttcatacattagtggtagtggtaatagcatatactacgcagactctgtgaagggccgattcaccatctccagggacaacgccaagaactcactggatctgcaaatgaccagcctgagagccgaggacacggccgtatattactgtgcgcgctctactaaattcgattactggggtcaaggtactctggtgaccgtctcctcagcggccgcacccaccacgacgccagcgccgcgaccaccaaccccggcgcccacgatcgcgtcgcagcccctgtccctgcgcccagaggcgtgccggccagcggcggggggcgcagtgcacacgagggggctggacttcgcctgtgatatctacatctgggcgcccctggccgggacttgtggggtccttctcctgtcactggttatcaccctttactgcaacaaacggggcagaaagaagctcctgtatatattcaaacaaccatttatgagaccagtacaaactactcaagaggaagatggctgtagctgccgatttccagaagaagaagaaggaggatgtgaactgagagtgaagttcagcaggagcgcagagccccccgcgtaccagcagggccagaaccagctctataacgagctcaatctaggacgaagagaggagtacgatgttttggacaagagacgtggccgggaccctgagatggggggaaagccgagaaggaagaaccctcaggaaggcctgtacaatgaactgcagaaagataagatggcggaggcctacagtgagattgggatgaaaggcgagcgccggaggggcaaggggcacgatggcctttaccagggtctcagtacagccaccaaggacacctacgacgcccttcacatgcaggccctgccccctcgctaacagccactcgaggatccggattagtccaatttgttaaagacaggatatcagtggtccaggctctagttttgactcaacaatatcaccagctgaagcctatagagtacgagccatagataaaataaaagattttatttagtctccagaaaaaggggggaatgaaagaccccacctgtaggtttggcaagctagcttaagtaacgccattttgcaaggcatggaaaaatacataactgagaatagagaagttcagatcaaggtcaggaacagatggaacagctgaatatgggccaaacaggatatctgtggtaagcagttcctgccccggctcagggccaagaacagatggaacagctgaatatgggccaaacaggatatctgtggtaagcagttcctgccccggctcagggccaagaacagatggtccccagatgcggtccagccctcagcagtttctagagaaccatcagatgtttccagggtgccccaaggacctgaaatgaccctgtgccttatttgaactaaccaatcagttcgcttctcgcttctgttcgcgcgcttctgctccccgagctcaataaaagagcccacaacccctcactcggggcgccagtcctccgattgactgagtcgcccgggtacccgtgtatccaataaaccctcttgcagttgcatccgacttgtggtctcgctgttccttgggagggtctcctctgagtgattgactacccgtcagcgggggtctttcacacatgcagcatgtatcaaaattaatttggttttttttcttaagtatttacattaaatggccatagtacttaaagttacattggcttccttgaaataaacatggagtattcagaatgtgtcataaatatttctaattttaagatagtatctccattggctttctactttttcttttatttttttttgtcctctgtcttccatttgttgttgttgttgtttgtttgtttgtttgttggttggttggttaatttttttttaaagatcctacactatagttcaagctagactattagctactctgtaacccagggtgaccttgaagtcatgggtagcctgctgttttagccttcccacatctaagattacaggtatgagctatcatttttggtatattgattgattgattgattgatgtgtgtgtgtgtgattgtgtttgtgtgtgtgactgtgaaaatgtgtgtatgggtgtgtgtgaatgtgtgtatgtatgtgtgtgtgtgagtgtgtgtgtgtgtgtgtgcatgtgtgtgtgtgtgactgtgtctatgtgtatgactgtgtgtgtgtgtgtgtgtgtgtgtgtgtgtgtgtgtgtgtgtgtgttgtgaaaaaatattctatggtagtgagagccaacgctccggctcaggtgtcaggttggtttttgagacagagtctttcacttagcttggaattcactggccgtcgttttacaacgtcgtgactgggaaaaccctggcgttacccaacttaatcgccttgcagcacatccccctttcgccagctggcgtaatagcgaagaggcccgcaccgatcgcccttcccaacagttgcgcagcctgaatggcgaatggcgcctgatgcggtattttctccttacgcatctgtgcggtatttcacaccgcatatggtgcactctcagtacaatctgctctgatgccgcatagttaagccagccccgacacccgccaacacccgctgacgcgccctgacgggcttgtctgctcccggcatccgcttacagacaagctgtgaccgtctccgggagctgcatgtgtcagaggttttcaccgtcatcaccgaaacgcgcgatgacgaaagggcctcgtgatacgcctatttttataggttaatgtcatgataataatggtttcttagacgtcaggtggcacttttcggggaaatgtgcgcggaacccctatttgtttatttttctaaatacattcaaatatgtatccgctcatgagacaataaccctgataaatgcttcaataatattgaaaaaggaagagtatgagtattcaacatttccgtgtcgcccttattcccttttttgcggcattttgccttcctgtttttgctcacccagaaacgctggtgaaagtaaaagatgctgaagatcagttgggtgcacgagtgggttacatcgaactggatctcaacagcggtaagatccttgagagttttcgccccgaagaacgttttccaatgatgagcacttttaaagttctgctatgtggcgcggtattatcccgtattgacgccgggcaagagcaactcggtcgccgcatacactattctcagaatgacttggttgagtactcaccagtcacagaaaagcatcttacggatggcatgacagtaagagaattatgcagtgctgccataaccatgagtgataacactgcggccaacttacttctgacaacgatcggaggaccgaaggagctaaccgcttttttgcacaacatgggggatcatgtaactcgccttgatcgttgggaaccggagctgaatgaagccataccaaacgacgagcgtgacaccacgatgcctgtagcaatggcaacaacgttgcgcaaactattaactggcgaactacttactctagcttcccggcaacaattaatagactggatggaggcggataaagttgcaggaccacttctgcgctcggcccttccggctggctggtttattgctgataaatctggagccggtgagcgtgggtctcgcggtatcattgcagcactggggccagatggtaagccctcccgtatcgtagttatctacacgacggggagtcaggcaactatggatgaacgaaatagacagatcgctgagataggtgcctcactgattaagcattggtaactgtcagaccaagtttactcatatatactttagattgatttaaaacttcatttttaatttaaaaggatctaggtgaagatcctttttgataatctcatgaccaaaatcccttaacgtgagttttcgttccactgagcgtcagaccccgtagaaaagatcaaaggatcttcttgagatcctttttttctgcgcgtaatctgctgcttgcaaacaaaaaaaccaccgctaccagcggtggtttgtttgccggatcaagagctaccaactctttttccgaaggtaactggcttcagcagagcgcagataccaaatactgtccttctagtgtagccgtagttaggccaccacttcaagaactctgtagcaccgcctacatacctcgctctgctaatcctgttaccagtggctgctgccagtggcgataagtcgtgtcttaccgggttggactcaagacgatagttaccggataaggcgcagcggtcgggctgaacggggggttcgtgcacacagcccagcttggagcgaacgacctacaccgaactgagatacctacagcgtgagcattgagaaagcgccacgcttcccgaagggagaaaggcggacaggtatccggtaagcggcagggtcggaacaggagagcgcacgagggagcttccagggggaaacgcctggtatctttatagtcctgtcgggtttcgccacctctgacttgagcgtcgatttttgtgatgctcgtcaggggggcggagcctatggaaaaacgccagcaacgcggcctttttacggttcctggccttttgctggccttttgctcacatgttctttcctgcgttatcccctgattctgtggataaccgtattaccgcctttgagtgagctgataccgctcgccgcagccgaacgaccgagcgcagcgagtcagtgagcgaggaagcggaagagcgcccaatacgcaaaccgcctctccccgcgcgttggccgattcattaatgcagctggcacgacaggtttcccgactggaaagcgggcagtgagcgcaacgcaattaatgtgagttagctcactcattaggcaccccaggctttacactttatgcttccggctcgtatgttgtgtggaattgtgagcggataacaatttcacacaggaaacagctatgaccatgattacgccaagctttgctcttaggagtttcctaatacatcccaaactcaaatatataaagcatttgacttgttctatgccctagggggcggggggaagctaagccagctttttttaacatttaaaatgttaattccattttaaatgcacagatgtttttatttcataagggtttcaatgtgcatgaatgctgcaatattcctgttaccaaagctagtataaataaaaatagataaacgtggaaattacttagagtttctgtcattaacgtttccttcctcagttgacaacataaatgcgctgctgagcaagccagtttgcatctgtcaggatcaatttcccattatgccagtcatattaattactagtcaattagttgatttttatttttgacatatacatgtgaatgaaagaccccacctgtaggtttggcaagctagcttaagtaacgccattttgcaaggcatggaaaaatacataactgagaatagaaaagttcagatcaaggtcaggaacagatggaacagctgaatatgggccaaacaggatatctgtggtaagcagttcctgccccggctcagggccaagaacagatggaacagctgaatatgggccaaacaggatatctgtggtaagcagttcctgccccggctcagggccaagaacagatggtccccagatgcggtccagccctcagcagtttctagagaaccatcagatgtttccagggtgccccaaggacctgaaatgaccctgtgccttatttgaactaaccaatcagttcgcttctcgcttctgttcgcgcgcttatgctccccgagctcaataaaagagcccacaacccctcactcggggcgccagtcctccgattgactgagtcgcccgggtacccgtgtatccaataaaccctcttgcagttgcatccgacttgtggtctcgctgttccttgggagggtctcctctgagtgattgactacccgtcagcgggggtctttcatttgggggctcgtccgggatcgggagacccctgcccagggaccaccgacccaccaccgggaggtaagctggccagcaacttatctgtgtctgtccgattgtctagtgtctatgactgattttatgcgcctgcgtcggtactagttagctaactagctctgtatctggcggacccgtggtggaactgacgagttcggaacacccggccgcaaccctgggagacgtcccagggacttcgggggccgtttttgtggcccgacctgagtcctaaaatcccgatcgtttaggactctttggtgcaccccccttagaggagggatatgtggttctggtaggagacgagaacctaaaacagttcccgcctccgtctgaatttttgctttcggtttgggaccgaagccgcgccgcgcgtcttgtctgctgcagcatcgttctgtgttgtctctgtctgactgtgtttctgtatttgtctgaaaatatgggcccgggctagactgttaccactcccttaagtttgaccttaggtcactggaaagatgtcgagcggatcgctcacaaccagtcggtagatgtcaagaagagacgttgggttaccttctgctctgcagaatggccaacctttaacgtcggatggccgcgagacggcacctttaaccgagacctcatcacccaggttaagatcaaggtcttttcacctggcccgcatggacacccagaccaggtcccctacatcgtgacctgggaagccttggcttttgacccccctccctgggtcaagccctttgtacaccctaagcctccgcctcctcttcctccatccgccccgtctctcccccttgaacctcctcgttcgaccccgcctcgatcctccctttatccagccctcactccttctctaggcgcccccatatggccatatgagatcttatatggggcacccccgccccttgtaaacttccctgaccctgacatgacaagagttactaacagcccctctctccaagctcacttacaggctctctacttagtccagcacgaagtctggagacctctggcggcagcctaccaagaacaactggaccga

SEQ ID NO: 954 - DNA, 7848 bp, synthetic construct
  misc_feature 1..7848: note = Description of Artificial Sequence: Synthetic polynucleotide
  source 1..7848: mol_type = other DNA
ccggtggtacctcacccttaccgagtcggcgacacagtgtgggtccgccgacaccagactaagaacctagaacctcgctggaaaggaccttacacagtcctgctgaccacccccaccgccctcaaagtagacggcatcgcagcttggatacacgccgcccacgtgaaggctgccgaccccgggggtggaccatcctctagactgccatggaaaccgatacactgctgctgtgggtgctgctgctgtgggtgccaggatccacaggcaattttatgctgactcagccccactctgtgtcggagtctccggggaagacggtaaccatctcctgcacccgcagcagtggcagcattgccagcaactatgtgcagtggtaccagcagcgcccgggcagttcccccaccactgtgatctatgaggataaccaaagaccctctggggtccctgatcggttctctggctccatcgacagctcctccaactctgcctccctcaccatctctggactgaagactgaggacgaggctgactactactgtcagtcttatgatagcagcaattgggtgttcggcggagggaccaagctgaccgtcctaggttctagaggtggtggtggtagcggcggcggcggctctggtggtggtggatccctcgagatggccgaggtccagctggtgcagtctggggctgaggtgaagaagcctgggtcctcggtgaaggtctcctgcaaggcttctggaggcaccttcagcagctatgctatcagctgggtgcgacaggcccctggacaagggcttgagtggatgggagggatcatccctatctttggtacagcaaactacgcacagaagttccagggcagagtcacgattaccgcggacgaatccacgagcacagcctacatggagctgagcagcctgagatctgaggacacggccgtgtattactgtgcgcgctctaactactactacaacgattactggggtcaaggtactctggtgaccgtctcctcagcggccgcacccaccacgacgccagcgccgcgaccaccaaccccggcgcccacgatcgcgtcgcagcccctgtccctgcgcccagaggcgtgccggccagcggcggggggcgcagtgcacacgagggggctggacttcgcctgtgatatctacatctgggcgcccctggccgggacttgtggggtccttctcctgtcactggttatcaccctttactgcaacaaacggggcagaaagaagctcctgtatatattcaaacaaccatttatgagaccagtacaaactactcaagaggaagatggctgtagctgccgatttccagaagaagaagaaggaggatgtgaactgagagtgaagttcagcaggagcgcagagccccccgcgtaccagcagggccagaaccagctctataacgagctcaatctaggacgaagagaggagtacgatgttttggacaagagacgtggccgggaccctgagatggggggaaagccgagaaggaagaaccctcaggaaggcctgtacaatgaactgcagaaagataagatggcggaggcctacagtgagattgggatgaaaggcgagcgccggaggggcaaggggcacgatggcctttaccagggtctcagtacagccaccaaggacacctacgacgcccttcacatgcaggccctgccccctcgctaacagccactcgaggatccggattagtccaatttgttaaagacaggatatcagtggtccaggctctagttttgactcaacaatatcaccagctgaagcctatagagtacgagccatagataaaataaaagattttatttagtctccagaaaaaggggggaatgaaagaccccacctgtaggtttggcaagctagcttaagtaacgccattttgcaaggcatggaaaaatacataactgagaatagagaagttcagatcaaggtcaggaacagatggaacagctgaatatgggccaaacaggatatctgtggtaagcagttcctgccccggctcagggccaagaacagatggaacagctgaatatgggccaaacaggatatctgtggtaagcagttcctgccccggctcagggccaagaacagatggtccccagatgcggtccagccctcagcagtttctagagaaccatcagatgtttccagggtgccccaaggacctgaaatgaccctgtgccttatttgaactaaccaatcagttcgcttctcgcttctgttcgcgcgcttctgctccccgagctcaataaaagagcccacaacccctcactcggggcgccagtcctccgattgactgagtcgcccgggtacccgtgtatccaataaaccctcttgcagttgcatccgacttgtggtctcgctgttccttgggagggtctcctctgagtgattgactacccgtcagcgggggtctttcacacatgcagcatgtatcaaaattaatttggttttttttcttaagtatttacattaaatggccatagtacttaaagttacattggcttccttgaaataaacatggagtattcagaatgtgtcataaatatttctaattttaagatagtatctccattggctttctactttttcttttatttttttttgtcctctgtcttccatttgttgttgttgttgtttgtttgtttgtttgttggttggttggttaatttttttttaaagatcctacactatagttcaagctagactattagctactctgtaacccagggtgaccttgaagtcatgggtagcctgctgttttagccttcccacatctaagattacaggtatgagctatcatttttggtatattgattgattgattgattgatgtgtgtgtgtgtgattgtgtttgtgtgtgtgactgtgaaaatgtgtgtatgggtgtgtgtgaatgtgtgtatgtatgtgtgtgtgtgagtgtgtgtgtgtgtgtgtgcatgtgtgtgtgtgtgactgtgtctatgtgtatgactgtgtgtgtgtgtgtgtgtgtgtgtgtgtgtgtgtgtgtgtgtgtgttgtgaaaaaatattctatggtagtgagagccaacgctccggctcaggtgtcaggttggtttttgagacagagtctttcacttagcttggaattcactggccgtcgttttacaacgtcgtgactgggaaaaccctggcgttacccaacttaatcgccttgcagcacatccccctttcgccagctggcgtaatagcgaagaggcccgcaccgatcgcccttcccaacagttgcgcagcctgaatggcgaatggcgcctgatgcggtattttctccttacgcatctgtgcggtatttcacaccgcatatggtgcactctcagtacaatctgctctgatgccgcatagttaagccagccccgacacccgccaacacccgctgacgcgccctgacgggcttgtctgctcccggcatccgcttacagacaagctgtgaccgtctccgggagctgcatgtgtcagaggttttcaccgtcatcaccgaaacgcgcgatgacgaaagggcctcgtgatacgcctatttttataggttaatgtcatgataataatggtttcttagacgtcaggtggcacttttcggggaaatgtgcgcggaacccctatttgtttatttttctaaatacattcaaatatgtatccgctcatgagacaataaccctgataaatgcttcaataatattgaaaaaggaagagtatgagtattcaacatttccgtgtcgcccttattcccttttttgcggcattttgccttcctgtttttgctcacccagaaacgctggtgaaagtaaaagatgctgaagatcagttgggtgcacgagtgggttacatcgaactggatctcaacagcggtaagatccttgagagttttcgccccgaagaacgttttccaatgatgagcacttttaaagttctgctatgtggcgcggtattatcccgtattgacgccgggcaagagcaactcggtcgccgcatacactattctcagaatgacttggttgagtactcaccagtcacagaaaagcatcttacggatggcatgacagtaagagaattatgcagtgctgccataaccatgagtgataacactgcggccaacttacttctgacaacgatcggaggaccgaaggagctaaccgcttttttgcacaacatgggggatcatgtaactcgccttgatcgttgggaaccggagctgaatgaagccataccaaacgacgagcgtgacaccacgatgcctgtagcaatggcaacaacgttgcgcaaactattaactggcgaactacttactctagcttcccggcaacaattaatagactggatggaggcggataaagttgcaggaccacttctgcgctcggcccttccggctggctggtttattgctgataaatctggagccggtgagcgtgggtctcgcggtatcattgcagcactggggccagatggtaagccctcccgtatcgtagttatctacacgacggggagtcaggcaactatggatgaacgaaatagacagatcgctgagataggtgcctcactgattaagcattggtaactgtcagaccaagtttactcatatatactttagattgatttaaaacttcatttttaatttaaaaggatctaggtgaagatcctttttgataatctcatgaccaaaatcccttaacgtgagttttcgttccactgagcgtcagaccccgtagaaaagatcaaaggatcttcttgagatcctttttttctgcgcgtaatctgctgcttgcaaacaaaaaaaccaccgctaccagcggtggtttgtttgccggatcaagagctaccaactctttttccgaaggtaactggcttcagcagagcgcagataccaaatactgtccttctagtgtagccgtagttaggccaccacttcaagaactctgtagcaccgcctacatacctcgctctgctaatcctgttaccagtggctgctgccagtggcgataagtcgtgtcttaccgggttggactcaagacgatagttaccggataaggcgcagcggtcgggctgaacggggggttcgtgcacacagcccagcttggagcgaacgacctacaccgaactgagatacctacagcgtgagcattgagaaagcgccacgcttcccgaagggagaaaggcggacaggtatccggtaagcggcagggtcggaacaggagagcgcacgagggagcttccagggggaaacgcctggtatctttatagtcctgtcgggtttcgccacctctgacttgagcgtcgatttttgtgatgctcgtcaggggggcggagcctatggaaaaacgccagcaacgcggcctttttacggttcctggccttttgctggccttttgctcacatgttctttcctgcgttatcccctgattctgtggataaccgtattaccgcctttgagtgagctgataccgctcgccgcagccgaacgaccgagcgcagcgagtcagtgagcgaggaagcggaagagcgcccaatacgcaaaccgcctctccccgcgcgttggccgattcattaatgcagctggcacgacaggtttcccgactggaaagcgggcagtgagcgcaacgcaattaatgtgagttagctcactcattaggcaccccaggctttacactttatgcttccggctcgtatgttgtgtggaattgtgagcggataacaatttcacacaggaaacagctatgaccatgattacgccaagctttgctcttaggagtttcctaatacatcccaaactcaaatatataaagcatttgacttgttctatgccctagggggcggggggaagctaagccagctttttttaacatttaaaatgttaattccattttaaatgcacagatgtttttatttcataagggtttcaatgtgcatgaatgctgcaatattcctgttaccaaagctagtataaataaaaatagataaacgtggaaattacttagagtttctgtcattaacgtttccttcctcagttgacaacataaatgcgctgctgagcaagccagtttgcatctgtcaggatcaatttcccattatgccagtcatattaattactagtcaattagttgatttttatttttgacatatacatgtgaatgaaagaccccacctgtaggtttggcaagctagcttaagtaacgccattttgcaaggcatggaaaaatacataactgagaatagaaaagttcagatcaaggtcaggaacagatggaacagctgaatatgggccaaacaggatatctgtggtaagcagttcctgccccggctcagggccaagaacagatggaacagctgaatatgggccaaacaggatatctgtggtaagcagttcctgccccggctcagggccaagaacagatggtccccagatgcggtccagccctcagcagtttctagagaaccatcagatgtttccagggtgccccaaggacctgaaatgaccctgtgccttatttgaactaaccaatcagttcgcttctcgcttctgttcgcgcgcttatgctccccgagctcaataaaagagcccacaacccctcactcggggcgccagtcctccgattgactgagtcgcccgggtacccgtgtatccaataaaccctcttgcagttgcatccgacttgtggtctcgctgttccttgggagggtctcctctgagtgattgactacccgtcagcgggggtctttcatttgggggctcgtccgggatcgggagacccctgcccagggaccaccgacccaccaccgggaggtaagctggccagcaacttatctgtgtctgtccgattgtctagtgtctatgactgattttatgcgcctgcgtcggtactagttagctaactagctctgtatctggcggacccgtggtggaactgacgagttcggaacacccggccgcaaccctgggagacgtcccagggacttcgggggccgtttttgtggcccgacctgagtcctaaaatcccgatcgtttaggactctttggtgcaccccccttagaggagggatatgtggttctggtaggagacgagaacctaaaacagttcccgcctccgtctgaatttttgctttcggtttgggaccgaagccgcgccgcgcgtcttgtctgctgcagcatcgttctgtgttgtctctgtctgactgtgtttctgtatttgtctgaaaatatgggcccgggctagactgttaccactcccttaagtttgaccttaggtcactggaaagatgtcgagcggatcgctcacaaccagtcggtagatgtcaagaagagacgttgggttaccttctgctctgcagaatggccaacctttaacgtcggatggccgcgagacggcacctttaaccgagacctcatcacccaggttaagatcaaggtcttttcacctggcccgcatggacacccagaccaggtcccctacatcgtgacctgggaagccttggcttttgacccccctccctgggtcaagccctttgtacaccctaagcctccgcctcctcttcctccatccgccccgtctctcccccttgaacctcctcgttcgaccccgcctcgatcctccctttatccagccctcactccttctctaggcgcccccatatggccatatgagatcttatatggggcacccccgccccttgtaaacttccctgaccctgacatgacaagagttactaacagcccctctctccaagctcacttacaggctctctacttagtccagcacgaagtctggagacctctggcggcagcctaccaagaacaactggaccga

SEQ ID NO: 955 - DNA, 7872 bp, synthetic construct
  misc_feature 1..7872: note = Description of Artificial Sequence: Synthetic polynucleotide
  source 1..7872: mol_type = other DNA
ccggtggtacctcacccttaccgagtcggcgacacagtgtgggtccgccgacaccagactaagaacctagaacctcgctggaaaggaccttacacagtcctgctgaccacccccaccgccctcaaagtagacggcatcgcagcttggatacacgccgcccacgtgaaggctgccgaccccgggggtggaccatcctctagactgccatggaaaccgacaccctgctgctgtgggtgctgctgctgtgggtgccaggatccacaggacagtctgtcgtgacgcagccaccctcagcgtctgggacccccgggcagagggtcaccatctcttgttctggaagcagctccaacatcggaagtaattatgtatactggtaccagcagctcccaggaacggcccccaaactcctcatctatagtaataatcagcggccctcaggggtccctgaccgattctctggctccaagtctggcacctcagcctccctggccatcagtgggctccggtccgaggatgaggctgattattactgtgcagcatgggatgacagcctgagtggttatgtcttcggaactgggaccaagctgaccgtcctaggttctagaggtggtggtggtagcggcggcggcggctctggtggtggtggatccctcgagatggcccaggtgcagctacagcagtggggcgcaggactgttgaagccttcggagaccctgtccctcacctgcgctgtctatggtgggtccttcagtggttactactggagctggatccgccagcccccagggaaggggctggagtggattggggaaatcaatcatagtggaagcaccaactacaacccgtccctcaagagtcgagtcaccatatcagtagacacgtccaagaaccagttctccctgaagctgagctctgtgaccgccgcggacacggccgtgtattactgtgcgcgcctgtacgaaggtggttaccatggttggggttcttggctgtcttctgattcttggggtcaaggtactctggtgaccgtctcctcagcggccgcacccaccacgacgccagcgccgcgaccaccaaccccggcgcccacgatcgcgtcgcagcccctgtccctgcgcccagaggcgtgccggccagcggcggggggcgcagtgcacacgagggggctggacttcgcctgtgatatctacatctgggcgcccctggccgggacttgtggggtccttctcctgtcactggttatcaccctttactgcaacaaacggggcagaaagaagctcctgtatatattcaaacaaccatttatgagaccagtacaaactactcaagaggaagatggctgtagctgccgatttccagaagaagaagaaggaggatgtgaactgagagtgaagttcagcaggagcgcagagccccccgcgtaccagcagggccagaaccagctctataacgagctcaatctaggacgaagagaggagtacgatgttttggacaagagacgtggccgggaccctgagatggggggaaagccgagaaggaagaaccctcaggaaggcctgtacaatgaactgcagaaagataagatggcggaggcctacagtgagattgggatgaaaggcgagcgccggaggggcaaggggcacgatggcctttaccagggtctcagtacagccaccaaggacacctacgacgcccttcacatgcaggccctgccccctcgctaacagccactcgaggatccggattagtccaatttgttaaagacaggatatcagtggtccaggctctagttttgactcaacaatatcaccagctgaagcctatagagtacgagccatagataaaataaaagattttatttagtctccagaaaaaggggggaatgaaagaccccacctgtaggtttggcaagctagcttaagtaacgccattttgcaaggcatggaaaaatacataactgagaatagagaagttcagatcaaggtcaggaacagatggaacagctgaatatgggccaaacaggatatctgtggtaagcagttcctgccccggctcagggccaagaacagatggaacagctgaatatgggccaaacaggatatctgtggtaagcagttcctgccccggctcagggccaagaacagatggtccccagatgcggtccagccctcagcagtttctagagaaccatcagatgtttccagggtgccccaaggacctgaaatgaccctgtgccttatttgaactaaccaatcagttcgcttctcgcttctgttcgcgcgcttctgctccccgagctcaataaaagagcccacaacccctcactcggggcgccagtcctccgattgactgagtcgcccgggtacccgtgtatccaataaaccctcttgcagttgcatccgacttgtggtctcgctgttccttgggagggtctcctctgagtgattgactacccgtcagcgggggtctttcacacatgcagcatgtatcaaaattaatttggttttttttcttaagtatttacattaaatggccatagtacttaaagttacattggcttccttgaaataaacatggagtattcagaatgtgtcataaatatttctaattttaagatagtatctccattggctttctactttttcttttatttttttttgtcctctgtcttccatttgttgttgttgttgtttgtttgtttgtttgttggttggttggttaatttttttttaaagatcctacactatagttcaagctagactattagctactctgtaacccagggtgaccttgaagtcatgggtagcctgctgttttagccttcccacatctaagattacaggtatgagctatcatttttggtatattgattgattgattgattgatgtgtgtgtgtgtgattgtgtttgtgtgtgtgactgtgaaaatgtgtgtatgggtgtgtgtgaatgtgtgtatgtatgtgtgtgtgtgagtgtgtgtgtgtgtgtgtgcatgtgtgtgtgtgtgactgtgtctatgtgtatgactgtgtgtgtgtgtgtgtgtgtgtgtgtgtgtgtgtgtgtgtgtgtgttgtgaaaaaatattctatggtagtgagagccaacgctccggctcaggtgtcaggttggtttttgagacagagtctttcacttagcttggaattcactggccgtcgttttacaacgtcgtgactgggaaaaccctggcgttacccaacttaatcgccttgcagcacatccccctttcgccagctggcgtaatagcgaagaggcccgcaccgatcgcccttcccaacagttgcgcagcctgaatggcgaatggcgcctgatgcggtattttctccttacgcatctgtgcggtatttcacaccgcatatggtgcactctcagtacaatctgctctgatgccgcatagttaagccagccccgacacccgccaacacccgctgacgcgccctgacgggcttgtctgctcccggcatccgcttacagacaagctgtgaccgtctccgggagctgcatgtgtcagaggttttcaccgtcatcaccgaaacgcgcgatgacgaaagggcctcgtgatacgcctatttttataggttaatgtcatgataataatggtttcttagacgtcaggtggcacttttcggggaaatgtgcgcggaacccctatttgtttatttttctaaatacattcaaatatgtatccgctcatgagacaataaccctgataaatgcttcaataatattgaaaaaggaagagtatgagtattcaacatttccgtgtcgcccttattcccttttttgcggcattttgccttcctgtttttgctcacccagaaacgctggtgaaagtaaaagatgctgaagatcagttgggtgcacgagtgggttacatcgaactggatctcaacagcggtaagatccttgagagttttcgccccgaagaacgttttccaatgatgagcacttttaaagttctgctatgtggcgcggtattatcccgtattgacgccgggcaagagcaactcggtcgccgcatacactattctcagaatgacttggttgagtactcaccagtcacagaaaagcatcttacggatggcatgacagtaagagaattatgcagtgctgccataaccatgagtgataacactgcggccaacttacttctgacaacgatcggaggaccgaaggagctaaccgcttttttgcacaacatgggggatcatgtaactcgccttgatcgttgggaaccggagctgaatgaagccataccaaacgacgagcgtgacaccacgatgcctgtagcaatggcaacaacgttgcgcaaactattaactggcgaactacttactctagcttcccggcaacaattaatagactggatggaggcggataaagttgcaggaccacttctgcgctcggcccttccggctggctggtttattgctgataaatctggagccggtgagcgtgggtctcgcggtatcattgcagcactggggccagatggtaagccctcccgtatcgtagttatctacacgacggggagtcaggcaactatggatgaacgaaatagacagatcgctgagataggtgcctcactgattaagcattggtaactgtcagaccaagtttactcatatatactttagattgatttaaaacttcatttttaatttaaaaggatctaggtgaagatcctttttgataatctcatgaccaaaatcccttaacgtgagttttcgttccactgagcgtcagaccccgtagaaaagatcaaaggatcttcttgagatcctttttttctgcgcgtaatctgctgcttgcaaacaaaaaaaccaccgctaccagcggtggtttgtttgccggatcaagagctaccaactctttttccgaaggtaactggcttcagcagagcgcagataccaaatactgtccttctagtgtagccgtagttaggccaccacttcaagaactctgtagcaccgcctacatacctcgctctgctaatcctgttaccagtggctgctgccagtggcgataagtcgtgtcttaccgggttggactcaagacgatagttaccggataaggcgcagcggtcgggctgaacggggggttcgtgcacacagcccagcttggagcgaacgacctacaccgaactgagatacctacagcgtgagcattgagaaagcgccacgcttcccgaagggagaaaggcggacaggtatccggtaagcggcagggtcggaacaggagagcgcacgagggagcttccagggggaaacgcctggtatctttatagtcctgtcgggtttcgccacctctgacttgagcgtcgatttttgtgatgctcgtcaggggggcggagcctatggaaaaacgccagcaacgcggcctttttacggttcctggccttttgctggccttttgctcacatgttctttcctgcgttatcccctgattctgtggataaccgtattaccgcctttgagtgagctgataccgctcgccgcagccgaacgaccgagcgcagcgagtcagtgagcgaggaagcggaagagcgcccaatacgcaaaccgcctctccccgcgcgttggccgattcattaatgcagctggcacgacaggtttcccgactggaaagcgggcagtgagcgcaacgcaattaatgtgagttagctcactcattaggcaccccaggctttacactttatgcttccggctcgtatgttgtgtggaattgtgagcggataacaatttcacacaggaaacagctatgaccatgattacgccaagctttgctcttaggagtttcctaatacatcccaaactcaaatatataaagcatttgacttgttctatgccctagggggcggggggaagctaagccagctttttttaacatttaaaatgttaattccattttaaatgcacagatgtttttatttcataagggtttcaatgtgcatgaatgctgcaatattcctgttaccaaagctagtataaataaaaatagataaacgtggaaattacttagagtttctgtcattaacgtttccttcctcagttgacaacataaatgcgctgctgagcaagccagtttgcatctgtcaggatcaatttcccattatgccagtcatattaattactagtcaattagttgatttttatttttgacatatacatgtgaatgaaagaccccacctgtaggtttggcaagctagcttaagtaacgccattttgcaaggcatggaaaaatacataactgagaatagaaaagttcagatcaaggtcaggaacagatggaacagctgaatatgggccaaacaggatatctgtggtaagcagttcctgccccggctcagggccaagaacagatggaacagctgaatatgggccaaacaggatatctgtggtaagcagttcctgccccggctcagggccaagaacagatggtccccagatgcggtccagccctcagcagtttctagagaaccatcagatgtttccagggtgccccaaggacctgaaatgaccctgtgccttatttgaactaaccaatcagttcgcttctcgcttctgttcgcgcgcttatgctccccgagctcaataaaagagcccacaacccctcactcggggcgccagtcctccgattgactgagtcgcccgggtacccgtgtatccaataaaccctcttgcagttgcatccgacttgtggtctcgctgttccttgggagggtctcctctgagtgattgactacccgtcagcgggggtctttcatttgggggctcgtccgggatcgggagacccctgcccagggaccaccgacccaccaccgggaggtaagctggccagcaacttatctgtgtctgtccgattgtctagtgtctatgactgattttatgcgcctgcgtcggtactagttagctaactagctctgtatctggcggacccgtggtggaactgacgagttcggaacacccggccgcaaccctgggagacgtcccagggacttcgggggccgtttttgtggcccgacctgagtcctaaaatcccgatcgtttaggactctttggtgcaccccccttagaggagggatatgtggttctggtaggagacgagaacctaaaacagttcccgcctccgtctgaatttttgctttcggtttgggaccgaagccgcgccgcgcgtcttgtctgctgcagcatcgttctgtgttgtctctgtctgactgtgtttctgtatttgtctgaaaatatgggcccgggctagactgttaccactcccttaagtttgaccttaggtcactggaaagatgtcgagcggatcgctcacaaccagtcggtagatgtcaagaagagacgttgggttaccttctgctctgcagaatggccaacctttaacgtcggatggccgcgagacggcacctttaaccgagacctcatcacccaggttaagatcaaggtcttttcacctggcccgcatggacacccagaccaggtcccctacatcgtgacctgggaagccttggcttttgacccccctccctgggtcaagccctttgtacaccctaagcctccgcctcctcttcctccatccgccccgtctctcccccttgaacctcctcgttcgaccccgcctcgatcctccctttatccagccctcactccttctctaggcgcccccatatggccatatgagatcttatatggggcacccccgccccttgtaaacttccctgaccctgacatgacaagagttactaacagcccctctctccaagctcacttacaggctctctacttagtccagcacgaagtctggagacctctggcggcagcctaccaagaacaactggaccga

SEQ ID NO: 956 - DNA, 7845 bp, synthetic construct
  misc_feature 1..7845: note = Description of Artificial Sequence: Synthetic polynucleotide
  source 1..7845: mol_type = other DNA
ccggtggtacctcacccttaccgagtcggcgacacagtgtgggtccgccgacaccagactaagaacctagaacctcgctggaaaggaccttacacagtcctgctgaccacccccaccgccctcaaagtagacggcatcgcagcttggatacacgccgcccacgtgaaggctgccgaccccgggggtggaccatcctctagactgccatggaaaccgacaccctgctgctgtgggtgctgctgctgtgggtgccaggatccacaggaaattttatgctgactcagccccactctgtgtcggagtctccggggaagacggtaaccatctcctgcacccgcagcagtggcagcattgccagcaactatgtgcagtggtaccagcagcgcccgggcagtgcccccaccactgtgatctatgaggataaccaaagaccctctggggtccctgatcggttctctggctccatcgacagctcctccaactctgcctccctcaccatctctggactgaagactgaggacgaggctgactactactgtcagtcttatgatagcagcaatgtggtattcggcggagggaccaaggtcaccgtcctaggttctagaggtggtggtggtagcggcggcggcggctctggtggtggtggatccctcgagatggccgaggtgcagctggtggagtctgggggaggcttggtacagcctggagggtccctgagactctcctgtgcagcctctggattcaccttcagtagttatgaaatgaactgggtccgccaggctccagggaaggggctggagtgggtttcatacattagtagtagtggtagtaccatatactacgcagactctgtgaagggccgattcaccatctccagagacaacgccaagaactcactgtatctgcaaatgaacagcctgagagccgaggacacggctgtttattactgtgcacgctgggactacggtatggacgtctggggccaagggaccacggtcaccgtctcctcagcggccgcacccaccacgacgccagcgccgcgaccaccaaccccggcgcccacgatcgcgtcgcagcccctgtccctgcgcccagaggcgtgccggccagcggcggggggcgcagtgcacacgagggggctggacttcgcctgtgatatctacatctgggcgcccctggccgggacttgtggggtccttctcctgtcactggttatcaccctttactgcaacaaacggggcagaaagaagctcctgtatatattcaaacaaccatttatgagaccagtacaaactactcaagaggaagatggctgtagctgccgatttccagaagaagaagaaggaggatgtgaactgagagtgaagttcagcaggagcgcagagccccccgcgtaccagcagggccagaaccagctctataacgagctcaatctaggacgaagagaggagtacgatgttttggacaagagacgtggccgggaccctgagatggggggaaagccgagaaggaagaaccctcaggaaggcctgtacaatgaactgcagaaagataagatggcggaggcctacagtgagattgggatgaaaggcgagcgccggaggggcaaggggcacgatggcctttaccagggtctcagtacagccaccaaggacacctacgacgcccttcacatgcaggccctgccccctcgctaacagccactcgaggatccggattagtccaatttgttaaagacaggatatcagtggtccaggctctagttttgactcaacaatatcaccagctgaagcctatagagtacgagccatagataaaataaaagattttatttagtctccagaaaaaggggggaatgaaagaccccacctgtaggtttggcaagctagcttaagtaacgccattttgcaaggcatggaaaaatacataactgagaatagagaagttcagatcaaggtcaggaacagatggaacagctgaatatgggccaaacaggatatctgtggtaagcagttcctgccccggctcagggccaagaacagatggaacagctgaatatgggccaaacaggatatctgtggtaagcagttcctgccccggctcagggccaagaacagatggtccccagatgcggtccagccctcagcagtttctagagaaccatcagatgtttccagggtgccccaaggacctgaaatgaccctgtgccttatttgaactaaccaatcagttcgcttctcgcttctgttcgcgcgcttctgctccccgagctcaataaaagagcccacaacccctcactcggggcgccagtcctccgattgactgagtcgcccgggtacccgtgtatccaataaaccctcttgcagttgcatccgacttgtggtctcgctgttccttgggagggtctcctctgagtgattgactacccgtcagcgggggtctttcacacatgcagcatgtatcaaaattaatttggttttttttcttaagtatttacattaaatggccatagtacttaaagttacattggcttccttgaaataaacatggagtattcagaatgtgtcataaatatttctaattttaagatagtatctccattggctttctactttttcttttatttttttttgtcctctgtcttccatttgttgttgttgttgtttgtttgtttgtttgttggttggttggttaatttttttttaaagatcctacactatagttcaagctagactattagctactctgtaacccagggtgaccttgaagtcatgggtagcctgctgttttagccttcccacatctaagattacaggtatgagctatcatttttggtatattgattgattgattgattgatgtgtgtgtgtgtgattgtgtttgtgtgtgtgactgtgaaaatgtgtgtatgggtgtgtgtgaatgtgtgtatgtatgtgtgtgtgtgagtgtgtgtgtgtgtgtgtgcatgtgtgtgtgtgtgactgtgtctatgtgtatgactgtgtgtgtgtgtgtgtgtgtgtgtgtgtgtgtgtgtgtgtgtgtgttgtgaaaaaatattctatggtagtgagagccaacgctccggctcaggtgtcaggttggtttttgagacagagtctttcacttagcttggaattcactggccgtcgttttacaacgtcgtgactgggaaaaccctggcgttacccaacttaatcgccttgcagcacatccccctttcgccagctggcgtaatagcgaagaggcccgcaccgatcgcccttcccaacagttgcgcagcctgaatggcgaatggcgcctgatgcggtattttctccttacgcatctgtgcggtatttcacaccgcatatggtgcactctcagtacaatctgctctgatgccgcatagttaagccagccccgacacccgccaacacccgctgacgcgccctgacgggcttgtctgctcccggcatccgcttacagacaagctgtgaccgtctccgggagctgcatgtgtcagaggttttcaccgtcatcaccgaaacgcgcgatgacgaaagggcctcgtgatacgcctatttttataggttaatgtcatgataataatggtttcttagacgtcaggtggcacttttcggggaaatgtgcgcggaacccctatttgtttatttttctaaatacattcaaatatgtatccgctcatgagacaataaccctgataaatgcttcaataatattgaaaaaggaagagtatgagtattcaacatttccgtgtcgcccttattcccttttttgcggcattttgccttcctgtttttgctcacccagaaacgctggtgaaagtaaaagatgctgaagatcagttgggtgcacgagtgggttacatcgaactggatctcaacagcggtaagatccttgagagttttcgccccgaagaacgttttccaatgatgagcacttttaaagttctgctatgtggcgcggtattatcccgtattgacgccgggcaagagcaactcggtcgccgcatacactattctcagaatgacttggttgagtactcaccagtcacagaaaagcatcttacggatggcatgacagtaagagaattatgcagtgctgccataaccatgagtgataacactgcggccaacttacttctgacaacgatcggaggaccgaaggagctaaccgcttttttgcacaacatgggggatcatgtaactcgccttgatcgttgggaaccggagctgaatgaagccataccaaacgacgagcgtgacaccacgatgcctgtagcaatggcaacaacgttgcgcaaactattaactggcgaactacttactctagcttcccggcaacaattaatagactggatggaggcggataaagttgcaggaccacttctgcgctcggcccttccggctggctggtttattgctgataaatctggagccggtgagcgtgggtctcgcggtatcattgcagcactggggccagatggtaagccctcccgtatcgtagttatctacacgacggggagtcaggcaactatggatgaacgaaatagacagatcgctgagataggtgcctcactgattaagcattggtaactgtcagaccaagtttactcatatatactttagattgatttaaaacttcatttttaatttaaaaggatctaggtgaagatcctttttgataatctcatgaccaaaatcccttaacgtgagttttcgttccactgagcgtcagaccccgtagaaaagatcaaaggatcttcttgagatcctttttttctgcgcgtaatctgctgcttgcaaacaaaaaaaccaccgctaccagcggtggtttgtttgccggatcaagagctaccaactctttttccgaaggtaactggcttcagcagagcgcagataccaaatactgtccttctagtgtagccgtagttaggccaccacttcaagaactctgtagcaccgcctacatacctcgctctgctaatcctgttaccagtggctgctgccagtggcgataagtcgtgtcttaccgggttggactcaagacgatagttaccggataaggcgcagcggtcgggctgaacggggggttcgtgcacacagcccagcttggagcgaacgacctacaccgaactgagatacctacagcgtgagcattgagaaagcgccacgcttcccgaagggagaaaggcggacaggtatccggtaagcggcagggtcggaacaggagagcgcacgagggagcttccagggggaaacgcctggtatctttatagtcctgtcgggtttcgccacctctgacttgagcgtcgatttttgtgatgctcgtcaggggggcggagcctatggaaaaacgccagcaacgcggcctttttacggttcctggccttttgctggccttttgctcacatgttctttcctgcgttatcccctgattctgtggataaccgtattaccgcctttgagtgagctgataccgctcgccgcagccgaacgaccgagcgcagcgagtcagtgagcgaggaagcggaagagcgcccaatacgcaaaccgcctctccccgcgcgttggccgattcattaatgcagctggcacgacaggtttcccgactggaaagcgggcagtgagcgcaacgcaattaatgtgagttagctcactcattaggcaccccaggctttacactttatgcttccggctcgtatgttgtgtggaattgtgagcggataacaatttcacacaggaaacagctatgaccatgattacgccaagctttgctcttaggagtttcctaatacatcccaaactcaaatatataaagcatttgacttgttctatgccctagggggcggggggaagctaagccagctttttttaacatttaaaatgttaattccattttaaatgcacagatgtttttatttcataagggtttcaatgtgcatgaatgctgcaatattcctgttaccaaagctagtataaataaaaatagataaacgtggaaattacttagagtttctgtcattaacgtttccttcctcagttgacaacataaatgcgctgctgagcaagccagtttgcatctgtcaggatcaatttcccattatgccagtcatattaattactagtcaattagttgatttttatttttgacatatacatgtgaatgaaagaccccacctgtaggtttggcaagctagcttaagtaacgccattttgcaaggcatggaaaaatacataactgagaatagaaaagttcagatcaaggtcaggaacagatggaacagctgaatatgggccaaacaggatatctgtggtaagcagttcctgccccggctcagggccaagaacagatggaacagctgaatatgggccaaacaggatatctgtggtaagcagttcctgccccggctcagggccaagaacagatggtccccagatgcggtccagccctcagcagtttctagagaaccatcagatgtttccagggtgccccaaggacctgaaatgaccctgtgccttatttgaactaaccaatcagttcgcttctcgcttctgttcgcgcgcttatgctccccgagctcaataaaagagcccacaacccctcactcggggcgccagtcctccgattgactgagtcgcccgggtacccgtgtatccaataaaccctcttgcagttgcatccgacttgtggtctcgctgttccttgggagggtctcctctgagtgattgactacccgtcagcgggggtctttcatttgggggctcgtccgggatcgggagacccctgcccagggaccaccgacccaccaccgggaggtaagctggccagcaacttatctgtgtctgtccgattgtctagtgtctatgactgattttatgcgcctgcgtcggtactagttagctaactagctctgtatctggcggacccgtggtggaactgacgagttcggaacacccggccgcaaccctgggagacgtcccagggacttcgggggccgtttttgtggcccgacctgagtcctaaaatcccgatcgtttaggactctttggtgcaccccccttagaggagggatatgtggttctggtaggagacgagaacctaaaacagttcccgcctccgtctgaatttttgctttcggtttgggaccgaagccgcgccgcgcgtcttgtctgctgcagcatcgttctgtgttgtctctgtctgactgtgtttctgtatttgtctgaaaatatgggcccgggctagactgttaccactcccttaagtttgaccttaggtcactggaaagatgtcgagcggatcgctcacaaccagtcggtagatgtcaagaagagacgttgggttaccttctgctctgcagaatggccaacctttaacgtcggatggccgcgagacggcacctttaaccgagacctcatcacccaggttaagatcaaggtcttttcacctggcccgcatggacacccagaccaggtcccctacatcgtgacctgggaagccttggcttttgacccccctccctgggtcaagccctttgtacaccctaagcctccgcctcctcttcctccatccgccccgtctctcccccttgaacctcctcgttcgaccccgcctcgatcctccctttatccagccctcactccttctctaggcgcccccatatggccatatgagatcttatatggggcacccccgccccttgtaaacttccctgaccctgacatgacaagagttactaacagcccctctctccaagctcacttacaggctctctacttagtccagcacgaagtctggagacctctggcggcagcctaccaagaacaactggaccga

SEQ ID NO: 957 - DNA, 7854 bp, synthetic construct
  misc_feature 1..7854: note = Description of Artificial Sequence: Synthetic polynucleotide
  source 1..7854: mol_type = other DNA
ccggtggtacctcacccttaccgagtcggcgacacagtgtgggtccgccgacaccagactaagaacctagaacctcgctggaaaggaccttacacagtcctgctgaccacccccaccgccctcaaagtagacggcatcgcagcttggatacacgccgcccacgtgaaggctgccgaccccgggggtggaccatcctctagactgccatggaaaccgatacactgctgctgtgggtgctgctgctgtgggtgccaggatccacaggctcctatgtgctgactcagccaccctcagtgtccgtgtccccaggacagacagccagcatcacctgctctggagatagattgacgaataaatatgtttcctggtatcaacagaagccaggccagtcccctgtgttggtcatctatgaggatgccaagcggccctcagggatccctgcgcgattctctggctccaactctgggaacacagccactctgaccatcagcgggacccaggctatggatgagtctgaatattactgtcaggcgtgggacagcagtgtggtggtttttggcggagggaccaagctgaccgtcctaggttctagaggtggtggtggtagcggcggcggcggctctggtggtggtggatccctcgagatggccgaggtgcagctggtggagtctgggggaggcttggtacagcctggcaggtccctgagactctcctgtgcagcctctggatttacctttgatgattatgccatgcactgggtccggcaagctccagggaagggcctggagtgggtctcaggtattagttggaatagtggtagtataggctatgcggactctgtgaagggccgattcaccatctccagagacaacgccaagaactccctgtatctgcaaatgaacagtctgagagatgaggacacggccttgtattactgtgcaaaagaccgaggggggggagttatcgttaaggatgcttttgatatctggggccaagggacaatggtcaccgtctcttcagcggccgcacccaccacgacgccagcgccgcgaccaccaaccccggcgcccacgatcgcgtcgcagcccctgtccctgcgcccagaggcgtgccggccagcggcggggggcgcagtgcacacgagggggctggacttcgcctgtgatatctacatctgggcgcccctggccgggacttgtggggtccttctcctgtcactggttatcaccctttactgcaacaaacggggcagaaagaagctcctgtatatattcaaacaaccatttatgagaccagtacaaactactcaagaggaagatggctgtagctgccgatttccagaagaagaagaaggaggatgtgaactgagagtgaagttcagcaggagcgcagagccccccgcgtaccagcagggccagaaccagctctataacgagctcaatctaggacgaagagaggagtacgatgttttggacaagagacgtggccgggaccctgagatggggggaaagccgagaaggaagaaccctcaggaaggcctgtacaatgaactgcagaaagataagatggcggaggcctacagtgagattgggatgaaaggcgagcgccggaggggcaaggggcacgatggcctttaccagggtctcagtacagccaccaaggacacctacgacgcccttcacatgcaggccctgccccctcgctaacagccactcgaggatccggattagtccaatttgttaaagacaggatatcagtggtccaggctctagttttgactcaacaatatcaccagctgaagcctatagagtacgagccatagataaaataaaagattttatttagtctccagaaaaaggggggaatgaaagaccccacctgtaggtttggcaagctagcttaagtaacgccattttgcaaggcatggaaaaatacataactgagaatagagaagttcagatcaaggtcaggaacagatggaacagctgaatatgggccaaacaggatatctgtggtaagcagttcctgccccggctcagggccaagaacagatggaacagctgaatatgggccaaacaggatatctgtggtaagcagttcctgccccggctcagggccaagaacagatggtccccagatgcggtccagccctcagcagtttctagagaaccatcagatgtttccagggtgccccaaggacctgaaatgaccctgtgccttatttgaactaaccaatcagttcgcttctcgcttctgttcgcgcgcttctgctccccgagctcaataaaagagcccacaacccctcactcggggcgccagtcctccgattgactgagtcgcccgggtacccgtgtatccaataaaccctcttgcagttgcatccgacttgtggtctcgctgttccttgggagggtctcctctgagtgattgactacccgtcagcgggggtctttcacacatgcagcatgtatcaaaattaatttggttttttttcttaagtatttacattaaatggccatagtacttaaagttacattggcttccttgaaataaacatggagtattcagaatgtgtcataaatatttctaattttaagatagtatctccattggctttctactttttcttttatttttttttgtcctctgtcttccatttgttgttgttgttgtttgtttgtttgtttgttggttggttggttaatttttttttaaagatcctacactatagttcaagctagactattagctactctgtaacccagggtgaccttgaagtcatgggtagcctgctgttttagccttcccacatctaagattacaggtatgagctatcatttttggtatattgattgattgattgattgatgtgtgtgtgtgtgattgtgtttgtgtgtgtgactgtgaaaatgtgtgtatgggtgtgtgtgaatgtgtgtatgtatgtgtgtgtgtgagtgtgtgtgtgtgtgtgtgcatgtgtgtgtgtgtgactgtgtctatgtgtatgactgtgtgtgtgtgtgtgtgtgtgtgtgtgtgtgtgtgtgtgtgtgtgttgtgaaaaaatattctatggtagtgagagccaacgctccggctcaggtgtcaggttggtttttgagacagagtctttcacttagcttggaattcactggccgtcgttttacaacgtcgtgactgggaaaaccctggcgttacccaacttaatcgccttgcagcacatccccctttcgccagctggcgtaatagcgaagaggcccgcaccgatcgcccttcccaacagttgcgcagcctgaatggcgaatggcgcctgatgcggtattttctccttacgcatctgtgcggtatttcacaccgcatatggtgcactctcagtacaatctgctctgatgccgcatagttaagccagccccgacacccgccaacacccgctgacgcgccctgacgggcttgtctgctcccggcatccgcttacagacaagctgtgaccgtctccgggagctgcatgtgtcagaggttttcaccgtcatcaccgaaacgcgcgatgacgaaagggcctcgtgatacgcctatttttataggttaatgtcatgataataatggtttcttagacgtcaggtggcacttttcggggaaatgtgcgcggaacccctatttgtttatttttctaaatacattcaaatatgtatccgctcatgagacaataaccctgataaatgcttcaataatattgaaaaaggaagagtatgagtattcaacatttccgtgtcgcccttattcccttttttgcggcattttgccttcctgtttttgctcacccagaaacgctggtgaaagtaaaagatgctgaagatcagttgggtgcacgagtgggttacatcgaactggatctcaacagcggtaagatccttgagagttttcgccccgaagaacgttttccaatgatgagcacttttaaagttctgctatgtggcgcggtattatcccgtattgacgccgggcaagagcaactcggtcgccgcatacactattctcagaatgacttggttgagtactcaccagtcacagaaaagcatcttacggatggcatgacagtaagagaattatgcagtgctgccataaccatgagtgataacactgcggccaacttacttctgacaacgatcggaggaccgaaggagctaaccgcttttttgcacaacatgggggatcatgtaactcgccttgatcgttgggaaccggagctgaatgaagccataccaaacgacgagcgtgacaccacgatgcctgtagcaatggcaacaacgttgcgcaaactattaactggcgaactacttactctagcttcccggcaacaattaatagactggatggaggcggataaagttgcaggaccacttctgcgctcggcccttccggctggctggtttattgctgataaatctggagccggtgagcgtgggtctcgcggtatcattgcagcactggggccagatggtaagccctcccgtatcgtagttatctacacgacggggagtcaggcaactatggatgaacgaaatagacagatcgctgagataggtgcctcactgattaagcattggtaactgtcagaccaagtttactcatatatactttagattgatttaaaacttcatttttaatttaaaaggatctaggtgaagatcctttttgataatctcatgaccaaaatcccttaacgtgagttttcgttccactgagcgtcagaccccgtagaaaagatcaaaggatcttcttgagatcctttttttctgcgcgtaatctgctgcttgcaaacaaaaaaaccaccgctaccagcggtggtttgtttgccggatcaagagctaccaactctttttccgaaggtaactggcttcagcagagcgcagataccaaatactgtccttctagtgtagccgtagttaggccaccacttcaagaactctgtagcaccgcctacatacctcgctctgctaatcctgttaccagtggctgctgccagtggcgataagtcgtgtcttaccgggttggactcaagacgatagttaccggataaggcgcagcggtcgggctgaacggggggttcgtgcacacagcccagcttggagcgaacgacctacaccgaactgagatacctacagcgtgagcattgagaaagcgccacgcttcccgaagggagaaaggcggacaggtatccggtaagcggcagggtcggaacaggagagcgcacgagggagcttccagggggaaacgcctggtatctttatagtcctgtcgggtttcgccacctctgacttgagcgtcgatttttgtgatgctcgtcaggggggcggagcctatggaaaaacgccagcaacgcggcctttttacggttcctggccttttgctggccttttgctcacatgttctttcctgcgttatcccctgattctgtggataaccgtattaccgcctttgagtgagctgataccgctcgccgcagccgaacgaccgagcgcagcgagtcagtgagcgaggaagcggaagagcgcccaatacgcaaaccgcctctccccgcgcgttggccgattcattaatgcagctggcacgacaggtttcccgactggaaagcgggcagtgagcgcaacgcaattaatgtgagttagctcactcattaggcaccccaggctttacactttatgcttccggctcgtatgttgtgtggaattgtgagcggataacaatttcacacaggaaacagctatgaccatgattacgccaagctttgctcttaggagtttcctaatacatcccaaactcaaatatataaagcatttgacttgttctatgccctagggggcggggggaagctaagccagctttttttaacatttaaaatgttaattccattttaaatgcacagatgtttttatttcataagggtttcaatgtgcatgaatgctgcaatattcctgttaccaaagctagtataaataaaaatagataaacgtggaaattacttagagtttctgtcattaacgtttccttcctcagttgacaacataaatgcgctgctgagcaagccagtttgcatctgtcaggatcaatttcccattatgccagtcatattaattactagtcaattagttgatttttatttttgacatatacatgtgaatgaaagaccccacctgtaggtttggcaagctagcttaagtaacgccattttgcaaggcatggaaaaatacataactgagaatagaaaagttcagatcaaggtcaggaacagatggaacagctgaatatgggccaaacaggatatctgtggtaagcagttcctgccccggctcagggccaagaacagatggaacagctgaatatgggccaaacaggatatctgtggtaagcagttcctgccccggctcagggccaagaacagatggtccccagatgcggtccagccctcagcagtttctagagaaccatcagatgtttccagggtgccccaaggacctgaaatgaccctgtgccttatttgaactaaccaatcagttcgcttctcgcttctgttcgcgcgcttatgctccccgagctcaataaaagagcccacaacccctcactcggggcgccagtcctccgattgactgagtcgcccgggtacccgtgtatccaataaaccctcttgcagttgcatccgacttgtggtctcgctgttccttgggagggtctcctctgagtgattgactacccgtcagcgggggtctttcatttgggggctcgtccgggatcgggagacccctgcccagggaccaccgacccaccaccgggaggtaagctggccagcaacttatctgtgtctgtccgattgtctagtgtctatgactgattttatgcgcctgcgtcggtactagttagctaactagctctgtatctggcggacccgtggtggaactgacgagttcggaacacccggccgcaaccctgggagacgtcccagggacttcgggggccgtttttgtggcccgacctgagtcctaaaatcccgatcgtttaggactctttggtgcaccccccttagaggagggatatgtggttctggtaggagacgagaacctaaaacagttcccgcctccgtctgaatttttgctttcggtttgggaccgaagccgcgccgcgcgtcttgtctgctgcagcatcgttctgtgttgtctctgtctgactgtgtttctgtatttgtctgaaaatatgggcccgggctagactgttaccactcccttaagtttgaccttaggtcactggaaagatgtcgagcggatcgctcacaaccagtcggtagatgtcaagaagagacgttgggttaccttctgctctgcagaatggccaacctttaacgtcggatggccgcgagacggcacctttaaccgagacctcatcacccaggttaagatcaaggtcttttcacctggcccgcatggacacccagaccaggtcccctacatcgtgacctgggaagccttggcttttgacccccctccctgggtcaagccctttgtacaccctaagcctccgcctcctcttcctccatccgccccgtctctcccccttgaacctcctcgttcgaccccgcctcgatcctccctttatccagccctcactccttctctaggcgcccccatatggccatatgagatcttatatggggcacccccgccccttgtaaacttccctgaccctgacatgacaagagttactaacagcccctctctccaagctcacttacaggctctctacttagtccagcacgaagtctggagacctctggcggcagcctaccaagaacaactggaccga

SEQ ID NO: 958 - DNA, 7866 bp, synthetic construct
  misc_feature 1..7866: note = Description of Artificial Sequence: Synthetic polynucleotide
  source 1..7866: mol_type = other DNA
ccggtggtacctcacccttaccgagtcggcgacacagtgtgggtccgccgacaccagactaagaacctagaacctcgctggaaaggaccttacacagtcctgctgaccacccccaccgccctcaaagtagacggcatcgcagcttggatacacgccgcccacgtgaaggctgccgaccccgggggtggaccatcctctagactgccatggaaaccgacaccctgctgctgtgggtgctgctgctgtgggtgccaggatccacaggactgcctgtgctgactcagccaccctcagcgtctgcgacccccgggcagagggtcaccatctcttgttctggaaccacctccaacatcggaagtaatactgtacactggtaccagcagctcccagggacggcccccaaactcctcatctataataataatcagcggccctcaggggtccctgaccgattctctggctccaagtctggcacctcagcctccctggccatcagtgggctccggtccgaggatgaggctacatattcctgtgcaacatgggatgacagcctgagtggtgtggtcttcggcggagggaccaagctgaccgtcctaggttctagaggtggtggtggtagcggcggcggcggctctggtggtggtggatccctcgagatggccgaggtccagctggtgcagtctggggctgaggtgaagaagcctgggtcctcggtgaaggtctcctgcaaggcttctggaggcaccttcagcagctatgctatcagctgggtgcgacaggcccctggacaagggcttgagtggatgggagggatcatccctatctttggtacagcaaactacgcacagaagttccagggcagagtcacgattaccgcggacgaatccacgagcacagcctacatggagctgagcagcctgagatctgaggacacggccgtgtattactgtgcgagagatcccgcctacggtgactacgagtatgatgcttttgatatctggggccaagggacaatggtcaccgtctcttcagcggccgcacccaccacgacgccagcgccgcgaccaccaaccccggcgcccacgatcgcgtcgcagcccctgtccctgcgcccagaggcgtgccggccagcggcggggggcgcagtgcacacgagggggctggacttcgcctgtgatatctacatctgggcgcccctggccgggacttgtggggtccttctcctgtcactggttatcaccctttactgcaacaaacggggcagaaagaagctcctgtatatattcaaacaaccatttatgagaccagtacaaactactcaagaggaagatggctgtagctgccgatttccagaagaagaagaaggaggatgtgaactgagagtgaagttcagcaggagcgcagagccccccgcgtaccagcagggccagaaccagctctataacgagctcaatctaggacgaagagaggagtacgatgttttggacaagagacgtggccgggaccctgagatggggggaaagccgagaaggaagaaccctcaggaaggcctgtacaatgaactgcagaaagataagatggcggaggcctacagtgagattgggatgaaaggcgagcgccggaggggcaaggggcacgatggcctttaccagggtctcagtacagccaccaaggacacctacgacgcccttcacatgcaggccctgccccctcgctaacagccactcgaggatccggattagtccaatttgttaaagacaggatatcagtggtccaggctctagttttgactcaacaatatcaccagctgaagcctatagagtacgagccatagataaaataaaagattttatttagtctccagaaaaaggggggaatgaaagaccccacctgtaggtttggcaagctagcttaagtaacgccattttgcaaggcatggaaaaatacataactgagaatagagaagttcagatcaaggtcaggaacagatggaacagctgaatatgggccaaacaggatatctgtggtaagcagttcctgccccggctcagggccaagaacagatggaacagctgaatatgggccaaacaggatatctgtggtaagcagttcctgccccggctcagggccaagaacagatggtccccagatgcggtccagccctcagcagtttctagagaaccatcagatgtttccagggtgccccaaggacctgaaatgaccctgtgccttatttgaactaaccaatcagttcgcttctcgcttctgttcgcgcgcttctgctccccgagctcaataaaagagcccacaacccctcactcggggcgccagtcctccgattgactgagtcgcccgggtacccgtgtatccaataaaccctcttgcagttgcatccgacttgtggtctcgctgttccttgggagggtctcctctgagtgattgactacccgtcagcgggggtctttcacacatgcagcatgtatcaaaattaatttggttttttttcttaagtatttacattaaatggccatagtacttaaagttacattggcttccttgaaataaacatggagtattcagaatgtgtcataaatatttctaattttaagatagtatctccattggctttctactttttcttttatttttttttgtcctctgtcttccatttgttgttgttgttgtttgtttgtttgtttgttggttggttggttaatttttttttaaagatcctacactatagttcaagctagactattagctactctgtaacccagggtgaccttgaagtcatgggtagcctgctgttttagccttcccacatctaagattacaggtatgagctatcatttttggtatattgattgattgattgattgatgtgtgtgtgtgtgattgtgtttgtgtgtgtgactgtgaaaatgtgtgtatgggtgtgtgtgaatgtgtgtatgtatgtgtgtgtgtgagtgtgtgtgtgtgtgtgtgcatgtgtgtgtgtgtgactgtgtctatgtgtatgactgtgtgtgtgtgtgtgtgtgtgtgtgtgtgtgtgtgtgtgtgtgtgttgtgaaaaaatattctatggtagtgagagccaacgctccggctcaggtgtcaggttggtttttgagacagagtctttcacttagcttggaattcactggccgtcgttttacaacgtcgtgactgggaaaaccctggcgttacccaacttaatcgccttgcagcacatccccctttcgccagctggcgtaatagcgaagaggcccgcaccgatcgcccttcccaacagttgcgcagcctgaatggcgaatggcgcctgatgcggtattttctccttacgcatctgtgcggtatttcacaccgcatatggtgcactctcagtacaatctgctctgatgccgcatagttaagccagccccgacacccgccaacacccgctgacgcgccctgacgggcttgtctgctcccggcatccgcttacagacaagctgtgaccgtctccgggagctgcatgtgtcagaggttttcaccgtcatcaccgaaacgcgcgatgacgaaagggcctcgtgatacgcctatttttataggttaatgtcatgataataatggtttcttagacgtcaggtggcacttttcggggaaatgtgcgcggaacccctatttgtttatttttctaaatacattcaaatatgtatccgctcatgagacaataaccctgataaatgcttcaataatattgaaaaaggaagagtatgagtattcaacatttccgtgtcgcccttattcccttttttgcggcattttgccttcctgtttttgctcacccagaaacgctggtgaaagtaaaagatgctgaagatcagttgggtgcacgagtgggttacatcgaactggatctcaacagcggtaagatccttgagagttttcgccccgaagaacgttttccaatgatgagcacttttaaagttctgctatgtggcgcggtattatcccgtattgacgccgggcaagagcaactcggtcgccgcatacactattctcagaatgacttggttgagtactcaccagtcacagaaaagcatcttacggatggcatgacagtaagagaattatgcagtgctgccataaccatgagtgataacactgcggccaacttacttctgacaacgatcggaggaccgaaggagctaaccgcttttttgcacaacatgggggatcatgtaactcgccttgatcgttgggaaccggagctgaatgaagccataccaaacgacgagcgtgacaccacgatgcctgtagcaatggcaacaacgttgcgcaaactattaactggcgaactacttactctagcttcccggcaacaattaatagactggatggaggcggataaagttgcaggaccacttctgcgctcggcccttccggctggctggtttattgctgataaatctggagccggtgagcgtgggtctcgcggtatcattgcagcactggggccagatggtaagccctcccgtatcgtagttatctacacgacggggagtcaggcaactatggatgaacgaaatagacagatcgctgagataggtgcctcactgattaagcattggtaactgtcagaccaagtttactcatatatactttagattgatttaaaacttcatttttaatttaaaaggatctaggtgaagatcctttttgataatctcatgaccaaaatcccttaacgtgagttttcgttccactgagcgtcagaccccgtagaaaagatcaaaggatcttcttgagatcctttttttctgcgcgtaatctgctgcttgcaaacaaaaaaaccaccgctaccagcggtggtttgtttgccggatcaagagctaccaactctttttccgaaggtaactggcttcagcagagcgcagataccaaatactgtccttctagtgtagccgtagttaggccaccacttcaagaactctgtagcaccgcctacatacctcgctctgctaatcctgttaccagtggctgctgccagtggcgataagtcgtgtcttaccgggttggactcaagacgatagttaccggataaggcgcagcggtcgggctgaacggggggttcgtgcacacagcccagcttggagcgaacgacctacaccgaactgagatacctacagcgtgagcattgagaaagcgccacgcttcccgaagggagaaaggcggacaggtatccggtaagcggcagggtcggaacaggagagcgcacgagggagcttccagggggaaacgcctggtatctttatagtcctgtcgggtttcgccacctctgacttgagcgtcgatttttgtgatgctcgtcaggggggcggagcctatggaaaaacgccagcaacgcggcctttttacggttcctggccttttgctggccttttgctcacatgttctttcctgcgttatcccctgattctgtggataaccgtattaccgcctttgagtgagctgataccgctcgccgcagccgaacgaccgagcgcagcgagtcagtgagcgaggaagcggaagagcgcccaatacgcaaaccgcctctccccgcgcgttggccgattcattaatgcagctggcacgacaggtttcccgactggaaagcgggcagtgagcgcaacgcaattaatgtgagttagctcactcattaggcaccccaggctttacactttatgcttccggctcgtatgttgtgtggaattgtgagcggataacaatttcacacaggaaacagctatgaccatgattacgccaagctttgctcttaggagtttcctaatacatcccaaactcaaatatataaagcatttgacttgttctatgccctagggggcggggggaagctaagccagctttttttaacatttaaaatgttaattccattttaaatgcacagatgtttttatttcataagggtttcaatgtgcatgaatgctgcaatattcctgttaccaaagctagtataaataaaaatagataaacgtggaaattacttagagtttctgtcattaacgtttccttcctcagttgacaacataaatgcgctgctgagcaagccagtttgcatctgtcaggatcaatttcccattatgccagtcatattaattactagtcaattagttgatttttatttttgacatatacatgtgaatgaaagaccccacctgtaggtttggcaagctagcttaagtaacgccattttgcaaggcatggaaaaatacataactgagaatagaaaagttcagatcaaggtcaggaacagatggaacagctgaatatgggccaaacaggatatctgtggtaagcagttcctgccccggctcagggccaagaacagatggaacagctgaatatgggccaaacaggatatctgtggtaagcagttcctgccccggctcagggccaagaacagatggtccccagatgcggtccagccctcagcagtttctagagaaccatcagatgtttccagggtgccccaaggacctgaaatgaccctgtgccttatttgaactaaccaatcagttcgcttctcgcttctgttcgcgcgcttatgctccccgagctcaataaaagagcccacaacccctcactcggggcgccagtcctccgattgactgagtcgcccgggtacccgtgtatccaataaaccctcttgcagttgcatccgacttgtggtctcgctgttccttgggagggtctcctctgagtgattgactacccgtcagcgggggtctttcatttgggggctcgtccgggatcgggagacccctgcccagggaccaccgacccaccaccgggaggtaagctggccagcaacttatctgtgtctgtccgattgtctagtgtctatgactgattttatgcgcctgcgtcggtactagttagctaactagctctgtatctggcggacccgtggtggaactgacgagttcggaacacccggccgcaaccctgggagacgtcccagggacttcgggggccgtttttgtggcccgacctgagtcctaaaatcccgatcgtttaggactctttggtgcaccccccttagaggagggatatgtggttctggtaggagacgagaacctaaaacagttcccgcctccgtctgaatttttgctttcggtttgggaccgaagccgcgccgcgcgtcttgtctgctgcagcatcgttctgtgttgtctctgtctgactgtgtttctgtatttgtctgaaaatatgggcccgggctagactgttaccactcccttaagtttgaccttaggtcactggaaagatgtcgagcggatcgctcacaaccagtcggtagatgtcaagaagagacgttgggttaccttctgctctgcagaatggccaacctttaacgtcggatggccgcgagacggcacctttaaccgagacctcatcacccaggttaagatcaaggtcttttcacctggcccgcatggacacccagaccaggtcccctacatcgtgacctgggaagccttggcttttgacccccctccctgggtcaagccctttgtacaccctaagcctccgcctcctcttcctccatccgccccgtctctcccccttgaacctcctcgttcgaccccgcctcgatcctccctttatccagccctcactccttctctaggcgcccccatatggccatatgagatcttatatggggcacccccgccccttgtaaacttccctgaccctgacatgacaagagttactaacagcccctctctccaagctcacttacaggctctctacttagtccagcacgaagtctggagacctctggcggcagcctaccaagaacaactggaccga

SEQ ID NO: 959 - DNA, 7860 bp, synthetic construct
  misc_feature 1..7860: note = Description of Artificial Sequence: Synthetic polynucleotide
  source 1..7860: mol_type = other DNA
ccggtggtacctcacccttaccgagtcggcgacacagtgtgggtccgccgacaccagactaagaacctagaacctcgctggaaaggaccttacacagtcctgctgaccacccccaccgccctcaaagtagacggcatcgcagcttggatacacgccgcccacgtgaaggctgccgaccccgggggtggaccatcctctagactgccatggaaaccgatacactgctgctgtgggtgctgctgctgtgggtgccaggatccacaggcgatgttgtgatgactcagtctccaccctccctgtccgtcacccctggagagccggcctccatcacctgcaggtctagtcagagcctcctggaaagaaatgcatacaactacttggattggtacctgcagaggccaggacagtctccacagctcctgatctacttgggttctaatcgggccgccggggtccctgacaggttcagtggcagtggatcaggcagagattttacactgaaaatcagcagagtggagcctgaggatgttggggtttattactgcatgcaagctctacaagctccgttcactttcggcggagggaccaaggtggagatcaaacgttctagaggtggtggtggtagcggcggcggcggctctggtggtggtggatccctcgagatggccgaagtgcagctggtgcagtctgggggaggcttggtacagcctggggggtccctgagactctcctgtgcagcctctggattcacctttagcagctatgccatgagctgggtccgccaggctccagggaaggggctggagtgggtctcagctattagtggtagtggtggtagcacatactacgcagactccgtgaagggccggttcaccatctccagagacaattccaagaacacgctgtatctgcaaatgaacagcctgagagccgaggacacggccgtatattactgtgcgaaatggggcccgtttcaggatgcttttgatatctggggccaagggacaatggtcaccgtctcttcagcggccgcacccaccacgacgccagcgccgcgaccaccaaccccggcgcccacgatcgcgtcgcagcccctgtccctgcgcccagaggcgtgccggccagcggcggggggcgcagtgcacacgagggggctggacttcgcctgtgatatctacatctgggcgcccctggccgggacttgtggggtccttctcctgtcactggttatcaccctttactgcaacaaacggggcagaaagaagctcctgtatatattcaaacaaccatttatgagaccagtacaaactactcaagaggaagatggctgtagctgccgatttccagaagaagaagaaggaggatgtgaactgagagtgaagttcagcaggagcgcagagccccccgcgtaccagcagggccagaaccagctctataacgagctcaatctaggacgaagagaggagtacgatgttttggacaagagacgtggccgggaccctgagatggggggaaagccgagaaggaagaaccctcaggaaggcctgtacaatgaactgcagaaagataagatggcggaggcctacagtgagattgggatgaaaggcgagcgccggaggggcaaggggcacgatggcctttaccagggtctcagtacagccaccaaggacacctacgacgcccttcacatgcaggccctgccccctcgctaacagccactcgaggatccggattagtccaatttgttaaagacaggatatcagtggtccaggctctagttttgactcaacaatatcaccagctgaagcctatagagtacgagccatagataaaataaaagattttatttagtctccagaaaaaggggggaatgaaagaccccacctgtaggtttggcaagctagcttaagtaacgccattttgcaaggcatggaaaaatacataactgagaatagagaagttcagatcaaggtcaggaacagatggaacagctgaatatgggccaaacaggatatctgtggtaagcagttcctgccccggctcagggccaagaacagatggaacagctgaatatgggccaaacaggatatctgtggtaagcagttcctgccccggctcagggccaagaacagatggtccccagatgcggtccagccctcagcagtttctagagaaccatcagatgtttccagggtgccccaaggacctgaaatgaccctgtgccttatttgaactaaccaatcagttcgcttctcgcttctgttcgcgcgcttctgctccccgagctcaataaaagagcccacaacccctcactcggggcgccagtcctccgattgactgagtcgcccgggtacccgtgtatccaataaaccctcttgcagttgcatccgacttgtggtctcgctgttccttgggagggtctcctctgagtgattgactacccgtcagcgggggtctttcacacatgcagcatgtatcaaaattaatttggttttttttcttaagtatttacattaaatggccatagtacttaaagttacattggcttccttgaaataaacatggagtattcagaatgtgtcataaatatttctaattttaagatagtatctccattggctttctactttttcttttatttttttttgtcctctgtcttccatttgttgttgttgttgtttgtttgtttgtttgttggttggttggttaatttttttttaaagatcctacactatagttcaagctagactattagctactctgtaacccagggtgaccttgaagtcatgggtagcctgctgttttagccttcccacatctaagattacaggtatgagctatcatttttggtatattgattgattgattgattgatgtgtgtgtgtgtgattgtgtttgtgtgtgtgactgtgaaaatgtgtgtatgggtgtgtgtgaatgtgtgtatgtatgtgtgtgtgtgagtgtgtgtgtgtgtgtgtgcatgtgtgtgtgtgtgactgtgtctatgtgtatgactgtgtgtgtgtgtgtgtgtgtgtgtgtgtgtgtgtgtgtgtgtgtgttgtgaaaaaatattctatggtagtgagagccaacgctccggctcaggtgtcaggttggtttttgagacagagtctttcacttagcttggaattcactggccgtcgttttacaacgtcgtgactgggaaaaccctggcgttacccaacttaatcgccttgcagcacatccccctttcgccagctggcgtaatagcgaagaggcccgcaccgatcgcccttcccaacagttgcgcagcctgaatggcgaatggcgcctgatgcggtattttctccttacgcatctgtgcggtatttcacaccgcatatggtgcactctcagtacaatctgctctgatgccgcatagttaagccagccccgacacccgccaacacccgctgacgcgccctgacgggcttgtctgctcccggcatccgcttacagacaagctgtgaccgtctccgggagctgcatgtgtcagaggttttcaccgtcatcaccgaaacgcgcgatgacgaaagggcctcgtgatacgcctatttttataggttaatgtcatgataataatggtttcttagacgtcaggtggcacttttcggggaaatgtgcgcggaacccctatttgtttatttttctaaatacattcaaatatgtatccgctcatgagacaataaccctgataaatgcttcaataatattgaaaaaggaagagtatgagtattcaacatttccgtgtcgcccttattcccttttttgcggcattttgccttcctgtttttgctcacccagaaacgctggtgaaagtaaaagatgctgaagatcagttgggtgcacgagtgggttacatcgaactggatctcaacagcggtaagatccttgagagttttcgccccgaagaacgttttccaatgatgagcacttttaaagttctgctatgtggcgcggtattatcccgtattgacgccgggcaagagcaactcggtcgccgcatacactattctcagaatgacttggttgagtactcaccagtcacagaaaagcatcttacggatggcatgacagtaagagaattatgcagtgctgccataaccatgagtgataacactgcggccaacttacttctgacaacgatcggaggaccgaaggagctaaccgcttttttgcacaacatgggggatcatgtaactcgccttgatcgttgggaaccggagctgaatgaagccataccaaacgacgagcgtgacaccacgatgcctgtagcaatggcaacaacgttgcgcaaactattaactggcgaactacttactctagcttcccggcaacaattaatagactggatggaggcggataaagttgcaggaccacttctgcgctcggcccttccggctggctggtttattgctgataaatctggagccggtgagcgtgggtctcgcggtatcattgcagcactggggccagatggtaagccctcccgtatcgtagttatctacacgacggggagtcaggcaactatggatgaacgaaatagacagatcgctgagataggtgcctcactgattaagcattggtaactgtcagaccaagtttactcatatatactttagattgatttaaaacttcatttttaatttaaaaggatctaggtgaagatcctttttgataatctcatgaccaaaatcccttaacgtgagttttcgttccactgagcgtcagaccccgtagaaaagatcaaaggatcttcttgagatcctttttttctgcgcgtaatctgctgcttgcaaacaaaaaaaccaccgctaccagcggtggtttgtttgccggatcaagagctaccaactctttttccgaaggtaactggcttcagcagagcgcagataccaaatactgtccttctagtgtagccgtagttaggccaccacttcaagaactctgtagcaccgcctacatacctcgctctgctaatcctgttaccagtggctgctgccagtggcgataagtcgtgtcttaccgggttggactcaagacgatagttaccggataaggcgcagcggtcgggctgaacggggggttcgtgcacacagcccagcttggagcgaacgacctacaccgaactgagatacctacagcgtgagcattgagaaagcgccacgcttcccgaagggagaaaggcggacaggtatccggtaagcggcagggtcggaacaggagagcgcacgagggagcttccagggggaaacgcctggtatctttatagtcctgtcgggtttcgccacctctgacttgagcgtcgatttttgtgatgctcgtcaggggggcggagcctatggaaaaacgccagcaacgcggcctttttacggttcctggccttttgctggccttttgctcacatgttctttcctgcgttatcccctgattctgtggataaccgtattaccgcctttgagtgagctgataccgctcgccgcagccgaacgaccgagcgcagcgagtcagtgagcgaggaagcggaagagcgcccaatacgcaaaccgcctctccccgcgcgttggccgattcattaatgcagctggcacgacaggtttcccgactggaaagcgggcagtgagcgcaacgcaattaatgtgagttagctcactcattaggcaccccaggctttacactttatgcttccggctcgtatgttgtgtggaattgtgagcggataacaatttcacacaggaaacagctatgaccatgattacgccaagctttgctcttaggagtttcctaatacatcccaaactcaaatatataaagcatttgacttgttctatgccctagggggcggggggaagctaagccagctttttttaacatttaaaatgttaattccattttaaatgcacagatgtttttatttcataagggtttcaatgtgcatgaatgctgcaatattcctgttaccaaagctagtataaataaaaatagataaacgtggaaattacttagagtttctgtcattaacgtttccttcctcagttgacaacataaatgcgctgctgagcaagccagtttgcatctgtcaggatcaatttcccattatgccagtcatattaattactagtcaattagttgatttttatttttgacatatacatgtgaatgaaagaccccacctgtaggtttggcaagctagcttaagtaacgccattttgcaaggcatggaaaaatacataactgagaatagaaaagttcagatcaaggtcaggaacagatggaacagctgaatatgggccaaacaggatatctgtggtaagcagttcctgccccggctcagggccaagaacagatggaacagctgaatatgggccaaacaggatatctgtggtaagcagttcctgccccggctcagggccaagaacagatggtccccagatgcggtccagccctcagcagtttctagagaaccatcagatgtttccagggtgccccaaggacctgaaatgaccctgtgccttatttgaactaaccaatcagttcgcttctcgcttctgttcgcgcgcttatgctccccgagctcaataaaagagcccacaacccctcactcggggcgccagtcctccgattgactgagtcgcccgggtacccgtgtatccaataaaccctcttgcagttgcatccgacttgtggtctcgctgttccttgggagggtctcctctgagtgattgactacccgtcagcgggggtctttcatttgggggctcgtccgggatcgggagacccctgcccagggaccaccgacccaccaccgggaggtaagctggccagcaacttatctgtgtctgtccgattgtctagtgtctatgactgattttatgcgcctgcgtcggtactagttagctaactagctctgtatctggcggacccgtggtggaactgacgagttcggaacacccggccgcaaccctgggagacgtcccagggacttcgggggccgtttttgtggcccgacctgagtcctaaaatcccgatcgtttaggactctttggtgcaccccccttagaggagggatatgtggttctggtaggagacgagaacctaaaacagttcccgcctccgtctgaatttttgctttcggtttgggaccgaagccgcgccgcgcgtcttgtctgctgcagcatcgttctgtgttgtctctgtctgactgtgtttctgtatttgtctgaaaatatgggcccgggctagactgttaccactcccttaagtttgaccttaggtcactggaaagatgtcgagcggatcgctcacaaccagtcggtagatgtcaagaagagacgttgggttaccttctgctctgcagaatggccaacctttaacgtcggatggccgcgagacggcacctttaaccgagacctcatcacccaggttaagatcaaggtcttttcacctggcccgcatggacacccagaccaggtcccctacatcgtgacctgggaagccttggcttttgacccccctccctgggtcaagccctttgtacaccctaagcctccgcctcctcttcctccatccgccccgtctctcccccttgaacctcctcgttcgaccccgcctcgatcctccctttatccagccctcactccttctctaggcgcccccatatggccatatgagatcttatatggggcacccccgccccttgtaaacttccctgaccctgacatgacaagagttactaacagcccctctctccaagctcacttacaggctctctacttagtccagcacgaagtctggagacctctggcggcagcctaccaagaacaactggaccga

SEQ ID NO: 960 - protein, 235 aa, Homo sapiens
MALPVTALLLPLALLLHAARPSQFRVSPLDRTWNLGETVELKCQVLLSNPTSGCSWLFQPRGAAASPTFLLYLSQNKPKAAEGLDTQRFSGKRLGDTFVLTLSDFRRENEGCYFCSALSNSIMYFSHFVPVFLPAKPTTTPAPRPPTPAPTIASQPLSLRPEACRPAAGGAVHTRGLDFACDIYIWAPLAGTCGVLLLSLVITLYCNHRNRRRVCKCPRPVVKSGDKPSLSARYV

SEQ ID NO: 961 - DNA, 213 bp, Homo sapiens
  source 1..213: mol_type = other DNA
cccaccacgacgccagcgccgcgaccaccaaccccggcgcccacgatcgcgtcgcagcccctgtccctgcgcccagaggcgtgccggccagcggcggggggcgcagtgcacacgagggggctggacttcgcctgtgatatctacatctgggcgcccctggccgggacttgtggggtccttctcctgtcactggttatcaccctttactgcaac

SEQ ID NO: 962 - DNA, 126 bp, Homo sapiens
  source 1..126: mol_type = other DNA
aaacggggcagaaagaagctcctgtatatattcaaacaaccatttatgagaccagtacaaactactcaagaggaagatggctgtagctgccgatttccagaagaagaagaaggaggatgtgaactg

SEQ ID NO: 963 - protein, 78 aa, Homo sapiens
GTHAAVGDLLELHCEALRGSPLILYRFFHEDVTLGNRSSPSGGASLNLSLTAEHSGNYSCEADNGLGAQRSETVTLYI

SEQ ID NO: 964 - protein, 12 aa, Homo sapiens
RSETVTLYITGL

SEQ ID NO: 965 - protein, 11 aa, Homo sapiens
SRPILTFRAPR

SEQ ID NO: 966 - protein, 4 aa, Homo sapiens
YVKM

SEQ ID NO: 967 - DNA, 822 bp, synthetic construct; identical to SEQ ID NO: 745
  misc_feature 1..822: note = Description of Artificial Sequence: Synthetic polynucleotide
  source 1..822: mol_type = other DNA

SEQ ID NO: 968 - protein, 274 aa, synthetic construct; identical to SEQ ID NO: 746
  REGION 1..274: note = Description of Artificial Sequence: Synthetic polypeptide

SEQ ID NO: 969 - DNA, 822 bp, synthetic construct; identical to SEQ ID NO: 747
  misc_feature 1..822: note = Description of Artificial Sequence: Synthetic polynucleotide
  source 1..822: mol_type = other DNA

SEQ ID NO: 970 - protein, 274 aa, synthetic construct; identical to SEQ ID NO: 748
  REGION 1..274: note = Description of Artificial Sequence: Synthetic polypeptide

SEQ ID NO: 971 - DNA, 825 bp, synthetic construct; identical to SEQ ID NO: 749
  misc_feature 1..825: note = Description of Artificial Sequence: Synthetic polynucleotide
  source 1..825: mol_type = other DNA

SEQ ID NO: 972 - protein, 275 aa, synthetic construct; identical to SEQ ID NO: 750
  REGION 1..275: note = Description of Artificial Sequence: Synthetic polypeptide

SEQ ID NO: 973 - DNA, 819 bp, synthetic construct; identical to SEQ ID NO: 751
  misc_feature 1..819: note = Description of Artificial Sequence: Synthetic polynucleotide
  source 1..819: mol_type = other DNA

SEQ ID NO: 974 - protein, 273 aa, synthetic construct; identical to SEQ ID NO: 752
  REGION 1..273: note = Description of Artificial Sequence: Synthetic polypeptide

SEQ ID NO: 975 - DNA, 813 bp, synthetic construct; identical to SEQ ID NO: 753
  misc_feature 1..813: note = Description of Artificial Sequence: Synthetic polynucleotide
  source 1..813: mol_type = other DNA

SEQ ID NO: 976 - protein, 271 aa, synthetic construct; identical to SEQ ID NO: 754
  REGION 1..271: note = Description of Artificial Sequence: Synthetic polypeptide

SEQ ID NO: 977 - DNA, 834 bp, synthetic construct; identical to SEQ ID NO: 755
  misc_feature 1..834: note = Description of Artificial Sequence: Synthetic polynucleotide
  source 1..834: mol_type = other DNA

SEQ ID NO: 978 - protein, 278 aa, synthetic construct; identical to SEQ ID NO: 756
  REGION 1..278: note = Description of Artificial Sequence: Synthetic polypeptide

SEQ ID NO: 979 - DNA, 831 bp, synthetic construct; identical to SEQ ID NO: 757
  misc_feature 1..831: note = Description of Artificial Sequence: Synthetic polynucleotide
  source 1..831: mol_type = other DNA

SEQ ID NO: 980 - protein, 277 aa, synthetic construct; identical to SEQ ID NO: 758
  REGION 1..277: note = Description of Artificial Sequence: Synthetic polypeptide

SEQ ID NO: 981 - DNA, 822 bp, synthetic construct; identical to SEQ ID NO: 759
  misc_feature 1..822: note = Description of Artificial Sequence: Synthetic polynucleotide
  source 1..822: mol_type = other DNA

SEQ ID NO: 982 - protein, 274 aa, synthetic construct; identical to SEQ ID NO: 760
  REGION 1..274: note = Description of Artificial Sequence: Synthetic polypeptide

SEQ ID NO: 983 - DNA, 825 bp, synthetic construct; identical to SEQ ID NO: 761
  misc_feature 1..825: note = Description of Artificial Sequence: Synthetic polynucleotide
  source 1..825: mol_type = other DNA

SEQ ID NO: 984 - protein, 275 aa, synthetic construct; identical to SEQ ID NO: 762
  REGION 1..275: note = Description of Artificial Sequence: Synthetic polypeptide

SEQ ID NO: 985 - DNA, 822 bp, synthetic construct; identical to SEQ ID NO: 763
  misc_feature 1..822: note = Description of Artificial Sequence: Synthetic polynucleotide
  source 1..822: mol_type = other DNA

SEQ ID NO: 986 - protein, 274 aa, synthetic construct; identical to SEQ ID NO: 764
  REGION 1..274: note = Description of Artificial Sequence: Synthetic polypeptide

SEQ ID NO: 987 - DNA, 828 bp, synthetic construct; identical to SEQ ID NO: 765
  misc_feature 1..828: note = Description of Artificial Sequence: Synthetic polynucleotide
  source 1..828: mol_type = other DNA

SEQ ID NO: 988 - protein, 276 aa, synthetic construct; identical to SEQ ID NO: 766
  REGION 1..276: note = Description of Artificial Sequence: Synthetic polypeptide

SEQ ID NO: 989 - DNA, 822 bp, synthetic construct; identical to SEQ ID NO: 767
  misc_feature 1..822: note = Description of Artificial Sequence: Synthetic polynucleotide
  source 1..822: mol_type = other DNA

SEQ ID NO: 990 - protein, 274 aa, synthetic construct; identical to SEQ ID NO: 768
  REGION 1..274: note = Description of Artificial Sequence: Synthetic polypeptide

SEQ ID NO: 991 - DNA, 816 bp, synthetic construct; identical to SEQ ID NO: 769
  misc_feature 1..816: note = Description of Artificial Sequence: Synthetic polynucleotide
  source 1..816: mol_type = other DNA

SEQ ID NO: 992 - protein, 272 aa, synthetic construct; identical to SEQ ID NO: 770
  REGION 1..272: note = Description of Artificial Sequence: Synthetic polypeptide

SEQ ID NO: 993 - DNA, 810 bp, synthetic construct; identical to SEQ ID NO: 771
  misc_feature 1..810: note = Description of Artificial Sequence: Synthetic polynucleotide
  source 1..810: mol_type = other DNA

SEQ ID NO: 994 - protein, 270 aa, synthetic construct; identical to SEQ ID NO: 772
  REGION 1..270: note = Description of Artificial Sequence: Synthetic polypeptide

SEQ ID NO: 995 - DNA, 810 bp, synthetic construct; identical to SEQ ID NO: 773
  misc_feature 1..810: note = Description of Artificial Sequence: Synthetic polynucleotide
  source 1..810: mol_type = other DNA

SEQ ID NO: 996 - protein, 270 aa, synthetic construct; identical to SEQ ID NO: 774
  REGION 1..270: note = Description of Artificial Sequence: Synthetic polypeptide

SEQ ID NO: 997 - DNA, 816 bp, synthetic construct; identical to SEQ ID NO: 775
  misc_feature 1..816: note = Description of Artificial Sequence: Synthetic polynucleotide
  source 1..816: mol_type = other DNA

SEQ ID NO: 998 - protein, 272 aa, synthetic construct; identical to SEQ ID NO: 776
  REGION 1..272: note = Description of Artificial Sequence: Synthetic polypeptide

SEQ ID NO: 999 - DNA, 870 bp, synthetic construct; identical to SEQ ID NO: 777
  misc_feature 1..870: note = Description of Artificial Sequence: Synthetic polynucleotide
  source 1..870: mol_type = other DNA

SEQ ID NO: 1000 - protein, 290 aa, synthetic construct; identical to SEQ ID NO: 778
  REGION 1..290: note = Description of Artificial Sequence: Synthetic polypeptide

SEQ ID NO: 1001 - DNA, 822 bp, synthetic construct; identical to SEQ ID NO: 779
  misc_feature 1..822: note = Description of Artificial Sequence: Synthetic polynucleotide
  source 1..822: mol_type = other DNA

SEQ ID NO: 1002 - protein, 274 aa, synthetic construct; identical to SEQ ID NO: 780
  REGION 1..274: note = Description of Artificial Sequence: Synthetic polypeptide

SEQ ID NO: 1003 - DNA, 822 bp, synthetic construct; identical to SEQ ID NO: 781
  misc_feature 1..822: note = Description of Artificial Sequence: Synthetic polynucleotide
  source 1..822: mol_type = other DNA

SEQ ID NO: 1004 - protein, 274 aa, synthetic construct; identical to SEQ ID NO: 782
  REGION 1..274: note = Description of Artificial Sequence: Synthetic polypeptide

SEQ ID NO: 1005 - DNA, 831 bp, synthetic construct; identical to SEQ ID NO: 783
  misc_feature 1..831: note = Description of Artificial Sequence: Synthetic polynucleotide
  source 1..831: mol_type = other DNA

SEQ ID NO: 1006 - protein, 277 aa, synthetic construct; identical to SEQ ID NO: 784
  REGION 1..277: note = Description of Artificial Sequence: Synthetic polypeptide

SEQ ID NO: 1007 - DNA, 822 bp, synthetic construct; identical to SEQ ID NO: 785
  misc_feature 1..822: note = Description of Artificial Sequence: Synthetic polynucleotide
  source 1..822: mol_type = other DNA

SEQ ID NO: 1008 - protein, 274 aa, synthetic construct; identical to SEQ ID NO: 786
  REGION 1..274: note = Description of Artificial Sequence: Synthetic polypeptide

SEQ ID NO: 1009 - DNA, 825 bp, synthetic construct; identical to SEQ ID NO: 787
  misc_feature 1..825: note = Description of Artificial Sequence: Synthetic polynucleotide
  source 1..825: mol_type = other DNA

SEQ ID NO: 1010 - protein, 275 aa, synthetic construct; identical to SEQ ID NO: 788
  REGION 1..275: note = Description of Artificial Sequence: Synthetic polypeptide

SEQ ID NO: 1011 - DNA, 816 bp, synthetic construct; identical to SEQ ID NO: 789
  misc_feature 1..816: note = Description of Artificial Sequence: Synthetic polynucleotide
  source 1..816: mol_type = other DNA

SEQ ID NO: 1012 - protein, 272 aa, synthetic construct; identical to SEQ ID NO: 790
  REGION 1..272: note = Description of Artificial Sequence: Synthetic polypeptide

SEQ ID NO: 1013 - DNA, 822 bp, synthetic construct; identical to SEQ ID NO: 791
  misc_feature 1..822: note = Description of Artificial Sequence: Synthetic polynucleotide
  source 1..822: mol_type = other DNA

SEQ ID NO: 1014 - protein, 274 aa, synthetic construct; identical to SEQ ID NO: 792
  REGION 1..274: note = Description of Artificial Sequence: Synthetic polypeptide

SEQ ID NO: 1015 - DNA, 852 bp, synthetic construct; identical to SEQ ID NO: 793
  misc_feature 1..852: note = Description of Artificial Sequence: Synthetic polynucleotide
  source 1..852: mol_type = other DNA

SEQ ID NO: 1016 - protein, 284 aa, synthetic construct; identical to SEQ ID NO: 794
  REGION 1..284: note = Description of Artificial Sequence: Synthetic polypeptide

SEQ ID NO: 1017 - DNA, 828 bp, synthetic construct; identical to SEQ ID NO: 795
  misc_feature 1..828: note = Description of Artificial Sequence: Synthetic polynucleotide
  source 1..828: mol_type = other DNA

SEQ ID NO: 1018 - protein, 276 aa, synthetic construct; identical to SEQ ID NO: 796
  REGION 1..276: note = Description of Artificial Sequence: Synthetic polypeptide

SEQ ID NO: 1019 - DNA, 822 bp, synthetic construct; identical to SEQ ID NO: 797
  misc_feature 1..822: note = Description of Artificial Sequence: Synthetic polynucleotide
  source 1..822: mol_type = other DNA

SEQ ID NO: 1020 - protein, 274 aa, synthetic construct; identical to SEQ ID NO: 798
  REGION 1..274: note = Description of Artificial Sequence: Synthetic polypeptide

SEQ ID NO: 1021 - DNA, 825 bp, synthetic construct; identical to SEQ ID NO: 799
  misc_feature 1..825: note = Description of Artificial Sequence: Synthetic polynucleotide
  source 1..825: mol_type = other DNA

SEQ ID NO: 1022 - protein, 275 aa, synthetic construct; identical to SEQ ID NO: 800
  REGION 1..275: note = Description of Artificial Sequence: Synthetic polypeptide

SEQ ID NO: 1023 - DNA, 807 bp, synthetic construct; identical to SEQ ID NO: 801
  misc_feature 1..807: note = Description of Artificial Sequence: Synthetic polynucleotide
  source 1..807: mol_type = other DNA

SEQ ID NO: 1024 - protein, 269 aa, synthetic construct; identical to SEQ ID NO: 802
  REGION 1..269: note = Description of Artificial Sequence: Synthetic polypeptide

SEQ ID NO: 1025 - DNA, 828 bp, synthetic construct; identical to SEQ ID NO: 803
  misc_feature 1..828: note = Description of Artificial Sequence: Synthetic polynucleotide
  source 1..828: mol_type = other DNA

SEQ ID NO: 1026 - protein, 276 aa, synthetic construct; identical to SEQ ID NO: 804
  REGION 1..276: note = Description of Artificial Sequence: Synthetic polypeptide

SEQ ID NO: 1027 - DNA, 819 bp, synthetic construct; identical to SEQ ID NO: 805
  misc_feature 1..819: note = Description of Artificial Sequence: Synthetic polynucleotide
  source 1..819: mol_type = other DNA

SEQ ID NO: 1028 - protein, 273 aa, synthetic construct; identical to SEQ ID NO: 806
  REGION 1..273: note = Description of Artificial Sequence: Synthetic polypeptide

SEQ ID NO: 1029 - DNA, 828 bp, synthetic construct; identical to SEQ ID NO: 807
  misc_feature 1..828: note = Description of Artificial Sequence: Synthetic polynucleotide
  source 1..828: mol_type = other DNA

SEQ ID NO: 1030 - protein, 276 aa, synthetic construct; identical to SEQ ID NO: 808
  REGION 1..276: note = Description of Artificial Sequence: Synthetic polypeptide

SEQ ID NO: 1031 - DNA, 822 bp, synthetic construct; identical to SEQ ID NO: 809
  misc_feature 1..822: note = Description of Artificial Sequence: Synthetic polynucleotide
  source 1..822: mol_type = other DNA

SEQ ID NO: 1032 - protein, 274 aa, synthetic construct; identical to SEQ ID NO: 810
  REGION 1..274: note = Description of Artificial Sequence: Synthetic polypeptide

SEQ ID NO: 1033 - DNA, 819 bp, synthetic construct; identical to SEQ ID NO: 811
  misc_feature 1..819: note = Description of Artificial Sequence: Synthetic polynucleotide
  source 1..819: mol_type = other DNA

SEQ ID NO: 1034 - protein, 273 aa, synthetic construct; identical to SEQ ID NO: 812
  REGION 1..273: note = Description of Artificial Sequence: Synthetic polypeptide

SEQ ID NO: 1035 - DNA, 828 bp, synthetic construct; identical to SEQ ID NO: 813
  misc_feature 1..828: note = Description of Artificial Sequence: Synthetic polynucleotide
  source 1..828: mol_type = other DNA

SEQ ID NO: 1036 - protein, 276 aa, synthetic construct; identical to SEQ ID NO: 814
  REGION 1..276: note = Description of Artificial Sequence: Synthetic polypeptide

SEQ ID NO: 1037 - DNA, 822 bp, synthetic construct; identical to SEQ ID NO: 815
  misc_feature 1..822: note = Description of Artificial Sequence: Synthetic polynucleotide
  source 1..822: mol_type = other DNA

SEQ ID NO: 1038 - protein, 274 aa, synthetic construct; identical to SEQ ID NO: 816
  REGION 1..274: note = Description of Artificial Sequence: Synthetic polypeptide

SEQ ID NO: 1039 - DNA, 822 bp, synthetic construct; identical to SEQ ID NO: 817
  misc_feature 1..822: note = Description of Artificial Sequence: Synthetic polynucleotide
  source 1..822: mol_type = other DNA

SEQ ID NO: 1040 - protein, 274 aa, synthetic construct; identical to SEQ ID NO: 818
  REGION 1..274: note = Description of Artificial Sequence: Synthetic polypeptide

SEQ ID NO: 1041 - DNA, 822 bp, synthetic construct; identical to SEQ ID NO: 819
  misc_feature 1..822: note = Description of Artificial Sequence: Synthetic polynucleotide
  source 1..822: mol_type = other DNA

SEQ ID NO: 1042 - protein, 274 aa, synthetic construct; identical to SEQ ID NO: 820
  REGION 1..274: note = Description of Artificial Sequence: Synthetic polypeptide

SEQ ID NO: 1043 - DNA, 840 bp, synthetic construct; identical to SEQ ID NO: 821
  misc_feature 1..840: note = Description of Artificial Sequence: Synthetic polynucleotide
  source 1..840: mol_type = other DNA

SEQ ID NO: 1044 - protein, 280 aa, synthetic construct; identical to SEQ ID NO: 822
  REGION 1..280: note = Description of Artificial Sequence: Synthetic polypeptide

SEQ ID NO: 1045 - DNA, 837 bp, synthetic construct; identical to SEQ ID NO: 823
  misc_feature 1..837: note = Description of Artificial Sequence: Synthetic polynucleotide
  source 1..837: mol_type = other DNA

SEQ ID NO: 1046 - protein, 279 aa, synthetic construct; identical to SEQ ID NO: 824
  REGION 1..279: note = Description of Artificial Sequence: Synthetic polypeptide

SEQ ID NO: 1047 - DNA, 819 bp, synthetic construct; identical to SEQ ID NO: 825
  misc_feature 1..819: note = Description of Artificial Sequence: Synthetic polynucleotide
  source 1..819: mol_type = other DNA

SEQ ID NO: 1048 - protein, 273 aa, synthetic construct; identical to SEQ ID NO: 826
  REGION 1..273: note = Description of Artificial Sequence: Synthetic polypeptide

SEQ ID NO: 1049 - DNA, 810 bp, synthetic construct; identical to SEQ ID NO: 827
  misc_feature 1..810: note = Description of Artificial Sequence: Synthetic polynucleotide
  source 1..810: mol_type = other DNA

SEQ ID NO: 1050 - protein, 270 aa, synthetic construct; identical to SEQ ID NO: 828
  REGION 1..270: note = Description of Artificial Sequence: Synthetic polypeptide

SEQ ID NO: 1051 - DNA, 846 bp, synthetic construct; identical to SEQ ID NO: 829
  misc_feature 1..846: note = Description of Artificial Sequence: Synthetic polynucleotide
  source 1..846: mol_type = other DNA

SEQ ID NO: 1052 - protein, 282 aa, synthetic construct; identical to SEQ ID NO: 830
  REGION 1..282: note = Description of Artificial Sequence: Synthetic polypeptide

SEQ ID NO: 1053 - DNA, 825 bp, synthetic construct; identical to SEQ ID NO: 831
  misc_feature 1..825: note = Description of Artificial Sequence: Synthetic polynucleotide
  source 1..825: mol_type = other DNA

SEQ ID NO: 1054 - protein, 274 aa, synthetic construct
  REGION 1..274: note = Description of Artificial Sequence: Synthetic polypeptide
QSVLTQPPSASGTPGQRVTISCSGSSSNIGSNTVNWYQQLPGTAPKLLIYSNNQRPSGVPDRFSGSKSGTSASLAISGLQSEDEADYYCAAWDDSLNGYWVFGGGTKLTVLGSRGGGGSGGGGSGGGGSLEMAQVQLQQWGAGLLKPSETLSLTCAVYGGSFSGYYWSWIRQPPGKGLEWIGEINHSGSTNYNPSLKSRVTISVDTSKNQFSLKLSSVTAADTAVYYCAREGAFDAFDIWGQGTMVTVSTSGQAGQHHHHHHGAYPYDVPDYAS

SEQ ID NO: 1055 - DNA, 831 bp, synthetic construct; identical to SEQ ID NO: 833
  misc_feature 1..831: note = Description of Artificial Sequence: Synthetic polynucleotide
  source 1..831: mol_type = other DNA

SEQ ID NO: 1056 - protein, 277 aa, synthetic construct; identical to SEQ ID NO: 834
  REGION 1..277: note = Description of Artificial Sequence: Synthetic polypeptide

SEQ ID NO: 1057 - DNA, 843 bp, synthetic construct; identical to SEQ ID NO: 835
  misc_feature 1..843: note = Description of Artificial Sequence: Synthetic polynucleotide
  source 1..843: mol_type = other DNA

SEQ ID NO: 1058 - protein, 281 aa, synthetic construct; identical to SEQ ID NO: 836
  REGION 1..281: note = Description of Artificial Sequence: Synthetic polypeptide

SEQ ID NO: 1059 - DNA, 825 bp, synthetic construct; identical to SEQ ID NO: 837
  misc_feature 1..825: note = Description of Artificial Sequence: Synthetic polynucleotide
  source 1..825: mol_type = other DNA

SEQ ID NO: 1060 - protein, 275 aa, synthetic construct; identical to SEQ ID NO: 838
  REGION 1..275: note = Description of Artificial Sequence: Synthetic polypeptide

SEQ ID NO: 1061 - DNA, 825 bp, synthetic construct; identical to SEQ ID NO: 839
  misc_feature 1..825: note = Description of Artificial Sequence: Synthetic polynucleotide
  source 1..825: mol_type = other DNA

SEQ ID NO: 1062 - protein, 275 aa, synthetic construct; identical to SEQ ID NO: 840
  REGION 1..275: note = Description of Artificial Sequence: Synthetic polypeptide

SEQ ID NO: 1063 - DNA, 840 bp, synthetic construct; identical to SEQ ID NO: 841
  misc_feature 1..840: note = Description of Artificial Sequence: Synthetic polynucleotide
  source 1..840: mol_type = other DNA

SEQ ID NO: 1064 - protein, 280 aa, synthetic construct; identical to SEQ ID NO: 842
  REGION 1..280: note = Description of Artificial Sequence: Synthetic polypeptide

SEQ ID NO: 1065 - DNA, 819 bp, synthetic construct; identical to SEQ ID NO: 843
  misc_feature 1..819: note = Description of Artificial Sequence: Synthetic polynucleotide
  source 1..819: mol_type = other DNA

SEQ ID NO: 1066 - protein, 273 aa, synthetic construct; identical to SEQ ID NO: 844
  REGION 1..273: note = Description of Artificial Sequence: Synthetic polypeptide

SEQ ID NO: 1067 - DNA, 837 bp, synthetic construct; identical to SEQ ID NO: 845
  misc_feature 1..837: note = Description of Artificial Sequence: Synthetic polynucleotide
  source 1..837: mol_type = other DNA

SEQ ID NO: 1068 - protein, 279 aa, synthetic construct; identical to SEQ ID NO: 846
  REGION 1..279: note = Description of Artificial Sequence: Synthetic polypeptide

SEQ ID NO: 1069 - DNA, 834 bp, synthetic construct; identical to SEQ ID NO: 847
  misc_feature 1..834: note = Description of Artificial Sequence: Synthetic polynucleotide
  source 1..834: mol_type = other DNA

SEQ ID NO: 1070 - protein, 278 aa, synthetic construct; identical to SEQ ID NO: 848
  REGION 1..278: note = Description of Artificial Sequence: Synthetic polypeptide

SEQ ID NO: 1071 - DNA, 849 bp, synthetic construct; identical to SEQ ID NO: 849
  misc_feature 1..849: note = Description of Artificial Sequence: Synthetic polynucleotide
  source 1..849: mol_type = other DNA

SEQ ID NO: 1072 - protein, 283 aa, synthetic construct; identical to SEQ ID NO: 850
  REGION 1..283: note = Description of Artificial Sequence: Synthetic polypeptide

SEQ ID NO: 1073 - DNA, 819 bp, synthetic construct; identical to SEQ ID NO: 851
  misc_feature 1..819: note = Description of Artificial Sequence: Synthetic polynucleotide
  source 1..819: mol_type = other DNA

SEQ ID NO: 1074 - protein, 273 aa, synthetic construct; identical to SEQ ID NO: 852
  REGION 1..273: note = Description of Artificial Sequence: Synthetic polypeptide

SEQ ID NO: 1075 - DNA, 828 bp, synthetic construct; identical to SEQ ID NO: 853
  misc_feature 1..828: note = Description of Artificial Sequence: Synthetic polynucleotide
  source 1..828: mol_type = other DNA

SEQ ID NO: 1076 - protein, 276 aa, synthetic construct; identical to SEQ ID NO: 854
  REGION 1..276: note = Description of Artificial Sequence: Synthetic polypeptide

SEQ ID NO: 1077 - DNA, 825 bp, synthetic construct; identical to SEQ ID NO: 855
  misc_feature 1..825: note = Description of Artificial Sequence: Synthetic polynucleotide
  source 1..825: mol_type = other DNA

SEQ ID NO: 1078 - protein, 275 aa, synthetic construct; identical to SEQ ID NO: 856
  REGION 1..275: note = Description of Artificial Sequence: Synthetic polypeptide

SEQ ID NO: 1079 - DNA, 843 bp, synthetic construct; identical to SEQ ID NO: 857
  misc_feature 1..843: note = Description of Artificial Sequence: Synthetic polynucleotide
  source 1..843: mol_type = other DNA

SEQ ID NO: 1080 - protein, 281 aa, synthetic construct; identical to SEQ ID NO: 858
  REGION 1..281: note = Description of Artificial Sequence: Synthetic polypeptide

SEQ ID NO: 1081 - DNA, 843 bp, synthetic construct; identical to SEQ ID NO: 859
  misc_feature 1..843: note = Description of Artificial Sequence: Synthetic polynucleotide
  source 1..843: mol_type = other DNA

SEQ ID NO: 1082 - protein, 281 aa, synthetic construct; identical to SEQ ID NO: 860
  REGION 1..281: note = Description of Artificial Sequence: Synthetic polypeptide

SEQ ID NO: 1083 - DNA, 840 bp, synthetic construct; identical to SEQ ID NO: 861
  misc_feature 1..840: note = Description of Artificial Sequence: Synthetic polynucleotide
  source 1..840: mol_type = other DNA

SEQ ID NO: 1084 - protein, 280 aa, synthetic construct; identical to SEQ ID NO: 862
  REGION 1..280: note = Description of Artificial Sequence: Synthetic polypeptide

SEQ ID NO: 1085 - DNA, 825 bp, synthetic construct; identical to SEQ ID NO: 863
  misc_feature 1..825: note = Description of Artificial Sequence: Synthetic polynucleotide
  source 1..825: mol_type = other DNA

SEQ ID NO: 1086 - protein, 275 aa, synthetic construct; identical to SEQ ID NO: 864
  REGION 1..275: note = Description of Artificial Sequence: Synthetic polypeptide

SEQ ID NO: 1087 - DNA, 819 bp, synthetic construct; identical to SEQ ID NO: 865
  misc_feature 1..819: note = Description of Artificial Sequence: Synthetic polynucleotide
  source 1..819: mol_type = other DNA

SEQ ID NO: 1088 - protein, 273 aa, synthetic construct; identical to SEQ ID NO: 866
  REGION 1..273: note = Description of Artificial Sequence: Synthetic polypeptide

SEQ ID NO: 1089 - DNA, 819 bp, synthetic construct; identical to SEQ ID NO: 867
  misc_feature 1..819: note = Description of Artificial Sequence: Synthetic polynucleotide
  source 1..819: mol_type = other DNA

SEQ ID NO: 1090 - protein, 273 aa, synthetic construct; identical to SEQ ID NO: 868
  REGION 1..273: note = Description of Artificial Sequence: Synthetic polypeptide

SEQ ID NO: 1091 - DNA, 843 bp, synthetic construct; identical to SEQ ID NO: 869
  misc_feature 1..843: note = Description of Artificial Sequence: Synthetic polynucleotide
  source 1..843: mol_type = other DNA

SEQ ID NO: 1092 - protein, 281 aa, synthetic construct; identical to SEQ ID NO: 870
  REGION 1..281: note = Description of Artificial Sequence: Synthetic polypeptide

SEQ ID NO: 1093 - DNA, 816 bp, synthetic construct; identical to SEQ ID NO: 871
  misc_feature 1..816: note = Description of Artificial Sequence: Synthetic polynucleotide
  source 1..816: mol_type = other DNA

SEQ ID NO: 1094 - protein, 272 aa, synthetic construct; identical to SEQ ID NO: 872
  REGION 1..272: note = Description of Artificial Sequence: Synthetic polypeptide

SEQ ID NO: 1095 - DNA, 837 bp, synthetic construct; identical to SEQ ID NO: 873
  misc_feature 1..837: note = Description of Artificial Sequence: Synthetic polynucleotide
  source 1..837: mol_type = other DNA

SEQ ID NO: 1096 - protein, 279 aa, synthetic construct; identical to SEQ ID NO: 874
  REGION 1..279: note = Description of Artificial Sequence: Synthetic polypeptide

SEQ ID NO: 1097 - DNA, 825 bp, synthetic construct; identical to SEQ ID NO: 875
  misc_feature 1..825: note = Description of Artificial Sequence: Synthetic polynucleotide
  source 1..825: mol_type = other DNA

SEQ ID NO: 1098 - protein, 275 aa, synthetic construct; identical to SEQ ID NO: 876
  REGION 1..275: note = Description of Artificial Sequence: Synthetic polypeptide

SEQ ID NO: 1099 - DNA, 834 bp, synthetic construct; identical to SEQ ID NO: 877
  misc_feature 1..834: note = Description of Artificial Sequence: Synthetic polynucleotide
  source 1..834: mol_type = other DNA

SEQ ID NO: 1100 - protein, 278 aa, synthetic construct; identical to SEQ ID NO: 878
  REGION 1..278: note = Description of Artificial Sequence: Synthetic polypeptide

SEQ ID NO: 1101 - DNA, 843 bp, synthetic construct; identical to SEQ ID NO: 879
  misc_feature 1..843: note = Description of Artificial Sequence: Synthetic polynucleotide
  source 1..843: mol_type = other DNA

SEQ ID NO: 1102 - protein, 281 aa, synthetic construct; identical to SEQ ID NO: 880
  REGION 1..281: note = Description of Artificial Sequence: Synthetic polypeptide

SEQ ID NO: 1103 - DNA, 819 bp, synthetic construct; identical to SEQ ID NO: 881
  misc_feature 1..819: note = Description of Artificial Sequence: Synthetic polynucleotide
  source 1..819: mol_type = other DNA

SEQ ID NO: 1104 - protein, 273 aa, synthetic construct; identical to SEQ ID NO: 882
  REGION 1..273: note = Description of Artificial Sequence: Synthetic polypeptide

SEQ ID NO: 1105 - DNA, 852 bp, synthetic construct; identical to SEQ ID NO: 883
  misc_feature 1..852: note = Description of Artificial Sequence: Synthetic polynucleotide
  source 1..852: mol_type = other DNA

SEQ ID NO: 1106 - protein, 284 aa, synthetic construct; identical to SEQ ID NO: 884
  REGION 1..284: note = Description of Artificial Sequence: Synthetic polypeptide

SEQ ID NO: 1107 - DNA, 855 bp, synthetic construct; identical to SEQ ID NO: 885
  misc_feature 1..855: note = Description of Artificial Sequence: Synthetic polynucleotide
  source 1..855: mol_type = other DNA

SEQ ID NO: 1108 - protein, 285 aa, synthetic construct; identical to SEQ ID NO: 886
  REGION 1..285: note = Description of Artificial Sequence: Synthetic polypeptide

SEQ ID NO: 1109 - DNA, 867 bp, synthetic construct; identical to SEQ ID NO: 887
  misc_feature 1..867: note = Description of Artificial Sequence: Synthetic polynucleotide
  source 1..867: mol_type = other DNA

SEQ ID NO: 1110 - protein, 289 aa, synthetic construct; identical to SEQ ID NO: 888
  REGION 1..289: note = Description of Artificial Sequence: Synthetic polypeptide

SEQ ID NO: 1111 - DNA, 852 bp, synthetic construct; identical to SEQ ID NO: 889
  misc_feature 1..852: note = Description of Artificial Sequence: Synthetic polynucleotide
  source 1..852: mol_type = other DNA

SEQ ID NO: 1112 - protein, 284 aa, synthetic construct; identical to SEQ ID NO: 890
  REGION 1..284: note = Description of Artificial Sequence: Synthetic polypeptide

SEQ ID NO: 1113 - DNA, 831 bp, synthetic construct; identical to SEQ ID NO: 891
  misc_feature 1..831: note = Description of Artificial Sequence: Synthetic polynucleotide
  source 1..831: mol_type = other DNA

SEQ ID NO: 1114 - protein, 277 aa, synthetic construct; identical to SEQ ID NO: 892
  REGION 1..277: note = Description of Artificial Sequence: Synthetic polypeptide

SEQ ID NO: 1115 - DNA, 819 bp, synthetic construct; identical to SEQ ID NO: 893
  misc_feature 1..819: note = Description of Artificial Sequence: Synthetic polynucleotide
  source 1..819: mol_type = other DNA

SEQ ID NO: 1116 - protein, 273 aa, synthetic construct; identical to SEQ ID NO: 894
  REGION 1..273: note = Description of Artificial Sequence: Synthetic polypeptide

SEQ ID NO: 1117 - DNA, 834 bp, synthetic construct; identical to SEQ ID NO: 895
  misc_feature 1..834: note = Description of Artificial Sequence: Synthetic polynucleotide
  source 1..834: mol_type = other DNA

SEQ ID NO: 1118 - protein, 278 aa, synthetic construct; identical to SEQ ID NO: 896
  REGION 1..278: note = Description of Artificial Sequence: Synthetic polypeptide

SEQ ID NO: 1119 - protein, 33 aa, synthetic construct
  REGION 1..33: note = Description of Artificial Sequence: Synthetic polypeptide
CLSSERERVEDLFEYECELLTSEPIFHCRQEDC

SEQ ID NO: 1120 - protein, 11 aa, Homo sapiens
LRGSPLILYRF

SEQ ID NO: 1121 - protein, 11 aa, Homo sapiens
LRGSSPILYWF

SEQ ID NO: 1122 - protein, 11 aa, Homo sapiens
APRGSPPILYW

SEQ ID NO: 1123 - protein, 10 aa, synthetic construct
  REGION 1..10: note = Description of Artificial Sequence: Synthetic peptide
ARNNHYYNDY

SEQ ID NO: 1124 - protein, 907 aa, synthetic construct
  REGION 1..907: note = Description of Artificial Sequence: Synthetic polypeptide
MLLWVILLVLAPVSGQFARTPRPIIFLQPPWTTVFQGERVTLTCKGFRFYSPQKTKWYHRYLGKEILRETPDNILEVQESGEYRCQAQGSPLSSPVHLDFSSASLILQAPLSVFEGDSVVLRCRAKAEVTLNNTIYKNDNVLAFLNKRTDFHIPHACLKDNGAYRCTGYKESCCPVSSNTVKIQVQEPFTRPVLRASSFQPISGNPVTLTCETQLSLERSDVPLRFRFFRDDQTLGLGWSLSPNFQITAMWSKDSGFYWCKAATMPHSIISDSPRSWIQVQIPASHPVLTLSPEKALNFEGTKVTLHCETQEDSLRTLYRFYHEGVPLRHKSVRCERGASISFSLTTENSGNYYCTADNGLGAKPSKAVSLSVTVPVSHPVLNLSSPEDLIFEGAKVTLHCEAQRGSLPILYQFHHEDAALERRSANSAGGVAISFSLTAEHSGNYYCTADNGFGPQRSKAVSLSITVPVSHPVLTLSSAEALTFEGATVTLHCEVQRGSPQILYQFYHEDMPLWSSSTPSVGRVSFSFSLTEGHSGNYYCTADNGFGPQRSEVVSLFVTVPVSRPILTLRVPRAQAVVGDLLELHCEAPRGSPPILYWFYHEDVTLGSSSAPSGGEASFNLSLTAEHSGNYSCEANNGLVAQHSDTISLSVIVPVSRPILTFRAPRAQAVVGDLLELHCEALRGSSPILYWFYHEDVTLGKISAPSGGGASFNLSLTTEHSGIYSCEADNGLEAQRSEMVTLKVAAAAEQKLISEEDLEQKLISEEDLEQKLISEEDLTGVAGGLLSIAGLAAGALLLYCWLSRKAGRKPASDPARSPSDSDSQEPTYHNVPAWEELQPVYTNANPRGENVVYSEVRIIQEKKKHAVASDPRHLRNKGSPIIYSEVKVASTPVSGSLFLASSAPHR

SEQ ID NO: 1125 - protein, 977 aa, Homo sapiens
MLLWVILLVLAPVSGQFARTPRPIIFLQPPWTTVFQGERVTLTCKGFRFYSPQKTKWYHRYLGKEILRETPDNILEVQESGEYRCQAQGSPLSSPVHLDFSSASLILQAPLSVFEGDSVVLRCRAKAEVTLNNTIYKNDNVLAFLNKRTDFHIPHACLKDNGAYRCTGYKESCCPVSSNTVKIQVQEPFTRPVLRASSFQPISGNPVTLTCETQLSLERSDVPLRFRFFRDDQTLGLGWSLSPNFQITAMWSKDSGFYWCKAATMPHSIISDSPRSWIQVQIPASHPVLTLSPEKALNFEGTKVTLHCETQEDSLRTLYRFYHEGVPLRHKSVRCERGASISFSLTTENSGNYYCTADNGLGAKPSKAVSLSVTVPVSHPVLNLSSPEDLIFEGAKVTLHCEAQRGSLPILYQFHHEDAALERRSANSAGGVAISFSLTAEHSGNYYCTADNGFGPQRSKAVSLSITVPVSHPVLTLSSAEALTFEGATVTLHCEVQRGSPQILYQFYHEDMPLWSSSTPSVGRVSFSFSLTEGHSGNYYCTADNGFGPQRSEVVSLFVTVPVSRPILTLRVPRAQAVVGDLLELHCEAPRGSPPILYWFYHEDVTLGSSSAPSGGEASFNLSLTAEHSGNYSCEANNGLVAQHSDTISLSVIVPVSRPILTFRAPRAQAVVGDLLELHCEALRGSSPILYWFYHEDVTLGKISAPSGGGASFNLSLTTEHSGIYSCEADNGPEAQRSEMVTLKVAVPVSRPVLTLRAPGTHAAVGDLLELHCEALRGSPLILYRFFHEDVTLGNRSSPSGGASLNLSLTAEHSGNYSCEADNGLGAQRSETVTLYITGLTANRSGPFATGVAGGLLSIAGLAAGALLLYCWLSRKAGRKPASDPARSPPDSDSQEPTYHNVPAWEELQPVYTNANPRGENVVYSEVRIIQEKKKHAVASDPRHLRNKGSPIIYSEVKVASTPVSGSLFLASSAPHR

SEQ ID NO: 1126 - protein, 977 aa, Homo sapiens
MLLWVILLVLAPVSGQFARTPRPIIFLQPPWTTVFQGERVTLTCKGFRFYSPQKTKWYHRYLGKEILRETPDNILEVQESGEYRCQAQGSPLSSPVHLDFSSASLILQAPLSVFEGDSVVLRCRAKAEVTLNNTIYKNDNVLAFLNKRTDFHIPHACLKDNGAYRCTGYKESCCPVSSNTVKIQVQEPFTRPVLRASSFQPISGNPVTLTCETQLSLERSDVPLRFRFFRDDQTLGLGWSLSPNFQITAMWSKDSGFYWCKAATMPHSVISDSPRSWIQVQIPASHPVLTLSPEKALNFEGTKVTLHCETQEDSLRTLYRFYHEGVPLRHKSVRCERGASISFSLTTENSGNYYCTADNGLGAKPSKAVSLSVTVPVSHPVLNLSSPEDLIFEGAKVTLHCEAQRGSLPILYQFHHEDAALERRSANSAGGVAISFSLTAEHSGNYYCTADNGFGPQRSKAVSLSITVPVSHPVLTLSSAEALTFEGATVTLHCEVQRGSPQILYQFYHEDMPLWSSSTPSVGRVSFSFSLTEGHSGNYYCTADNGFGPQRSEVVSLFVTVPVSRPILTLRVPRAQAVVGDLLELHCEAPRGSPPILYWFYHEDVTLGSSSAPSGGEASFNLSLTAEHSGNYSCEANNGLVAQHSDTISLSVIVPVSRPILTFRAPRAQAVVGDLLELHCEALRGSSPILYWFYHEDVTLGKISAPSGGGASFNLSLTTEHSGIYSCEADNGPEAQRSEMVTLKVAVPVSRPVLTLRAPGTHAAVGDLLELHCEALRGSPLILYRFFHEDVTLGNRSSPSGGASLNLSLTAEHSGNYSCEADNGLGAQRSETVTLYITGLTANRSGPFATGVAGGLLSIAGLAAGALLLYCWLSRKAGRKPASDPARSPPDSDSQEPTYHNVPAWEELQPVYTNANPRGENVVYSEVRIIQEKKKHAVASDPRHLRNKGSPIIYSEVKVASTPVSGSLFLASSAPHR

SEQ ID NO: 1127 - protein, 33 aa, synthetic construct
  REGION 1..33: note = Description of Artificial Sequence: Synthetic polypeptide
CMDYDFKVKLSSERERCWAIGCIFAELLTSEPC

SEQ ID NO: 1128 - protein, 33 aa, synthetic construct
  REGION 1..33: note = Description of Artificial Sequence: Synthetic polypeptide
CMDYDFKVKLSSERERCCIFAELLTSEPIFHCC

SEQ ID NO: 1129 - protein, 33 aa, synthetic construct
  REGION 1..33: note = Description of Artificial Sequence: Synthetic polypeptide
CMDYDFKVKLSSERERCELLTSEPIFHCRQEDC

SEQ ID NO: 1130 - protein, 33 aa, synthetic construct
  REGION 1..33: note = Description of Artificial Sequence: Synthetic polypeptide
CMDYDFKVKLSSERERCSEPIFHCRQEDIKTSC

SEQ ID NO: 1131 - protein, 33 aa, synthetic construct
  REGION 1..33: note = Description of Artificial Sequence: Synthetic polypeptide
CFKVKLSSERERVEDLCWAIGCIFAELLTSEPC

SEQ ID NO: 1132 - protein, 33 aa, synthetic construct
  REGION 1..33: note = Description of Artificial Sequence: Synthetic polypeptide
CFKVKLSSERERVEDLCCIFAELLTSEPIFHCC

SEQ ID NO: 1133 - protein, 33 aa, synthetic construct
  REGION 1..33: note = Description of Artificial Sequence: Synthetic polypeptide
CFKVKLSSERERVEDLCELLTSEPIFHCRQEDC

SEQ ID NO: 1134 - protein, 33 aa, synthetic construct
  REGION 1..33: note = Description of Artificial Sequence: Synthetic polypeptide
CFKVKLSSERERVEDLCSEPIFHCRQEDIKTSC

SEQ ID NO: 1135 - protein, 33 aa, synthetic construct
  REGION 1..33: note = Description of Artificial Sequence: Synthetic polypeptide
CLSSERERVEDLFEYECWAIGCIFAELLTSEPC

SEQ ID NO: 1136 - protein, 33 aa, synthetic construct
  REGION 1..33: note = Description of Artificial Sequence: Synthetic polypeptide
CLSSERERVEDLFEYECCIFAELLTSEPIFHCC

SEQ ID NO: 1137 - protein, 33 aa, synthetic construct
  REGION 1..33: note = Description of Artificial Sequence: Synthetic polypeptide
CLSSERERVEDLFEYECSEPIFHCRQEDIKTSC

SEQ ID NO: 1138 - protein, 33 aa, synthetic construct
  REGION 1..33: note = Description of Artificial Sequence: Synthetic polypeptide
CRERVEDLFEYEGCKVCWAIGCIFAELLTSEPC

SEQ ID NO: 1139 - protein, 33 aa, synthetic construct
  REGION 1..33: note = Description of Artificial Sequence: Synthetic polypeptide
CRERVEDLFEYEGCKVCCIFAELLTSEPIFHCC

SEQ ID NO: 1140 - protein, 33 aa, synthetic construct
  REGION 1..33: note = Description of Artificial Sequence: Synthetic polypeptide
CRERVEDLFEYEGCKVCELLTSEPIFHCRQEDC

SEQ ID NO: 1141 - protein, 33 aa, synthetic construct
  REGION 1..33: note = Description of Artificial Sequence: Synthetic polypeptide
CRERVEDLFEYEGCKVCSEPIFHCRQEDIKTSC

SEQ ID NO: 1142 - protein, 15 aa, synthetic construct
  REGION 1..15: note = Description of Artificial Sequence: Synthetic peptide
MDYDFKVKLSSERER

SEQ ID NO: 1143 - protein, 15 aa, synthetic construct
  REGION 1..15: note = Description of Artificial Sequence: Synthetic peptide
FKVKLSSERERVEDL

SEQ ID NO: 1144 - protein, 15 aa, synthetic construct
  REGION 1..15: note = Description of Artificial Sequence: Synthetic peptide
LSSERERVEDLFEYE

SEQ ID NO: 1145 - protein, 15 aa, synthetic construct
  REGION 1..15: note = Description of Artificial Sequence: Synthetic peptide
RERVEDLFEYEGCKV

SEQ ID NO: 1146 - protein, 15 aa, synthetic construct
  REGION 1..15: note = Description of Artificial Sequence: Synthetic peptide
WAIGCIFAELLTSEP

SEQ ID NO: 1147 - protein, 15 aa, synthetic construct
  REGION 1..15: note = Description of Artificial Sequence: Synthetic peptide
CIFAELLTSEPIFHC

SEQ ID NO: 1148 - protein, 15 aa, synthetic construct
  REGION 1..15: note = Description of Artificial Sequence: Synthetic peptide
ELLTSEPIFHCRQED

SEQ ID NO: 1149 - protein, 15 aa, synthetic construct
  REGION 1..15: note = Description of Artificial Sequence: Synthetic peptide
SEPIFHCRQEDIKTS

What is claimed is:

1. A chimeric antigen receptor (CAR), comprising an extracellular antigen-binding domain, a transmembrane domain, and an intracellular domain, wherein the extracellular antigen-binding domain specifically binds to Fc Receptor-Like 5 (FcRL5) and comprises:
(ab) a light chain variable region comprising a CDR1, a CDR2, and a CDR3 of the light chain variable region sequence set forth in SEQ ID NO:7, and a heavy chain variable region comprising a CDR1, a CDR2, and a CDR3 of the heavy chain variable region sequence set forth in SEQ ID NO:8;
(ac) a light chain variable region comprising a CDR1, a CDR2, and a CDR3 of the light chain variable region sequence set forth in SEQ ID NO:11, and a heavy chain variable region comprising a CDR1, a CDR2, and a CDR3 of the heavy chain variable region sequence set forth in SEQ ID NO:12;
(ad) a light chain variable region comprising a CDR1, a CDR2, and a CDR3 of the light chain variable region sequence set forth in SEQ ID NO:299, and a heavy chain variable region comprising a CDR1, a CDR2, and a CDR3 of the heavy chain variable region sequence set forth in SEQ ID NO:300;
(ae) a light chain variable region comprising a CDR1, a CDR2, and a CDR3 of the light chain variable region sequence set forth in SEQ ID NO:15, and a heavy chain variable region comprising a CDR1, a CDR2, and a CDR3 of the heavy chain variable region sequence set forth in SEQ ID NO:16;
(af) a light chain variable region comprising a CDR1, a CDR2, and a CDR3 of the light chain variable region sequence set forth in SEQ ID NO:19, and a heavy chain variable region comprising a CDR1, a CDR2, and a CDR3 of the heavy chain variable region sequence set forth in SEQ ID NO:20;
(ag) a light chain variable region comprising a CDR1, a CDR2, and a CDR3 of the light chain variable region sequence set forth in SEQ ID NO:23, and a heavy chain variable region comprising a CDR1, a CDR2, and a CDR3 of the heavy chain variable region sequence set forth in SEQ ID NO:24;
(ah) a light chain variable region comprising a CDR1, a CDR2, and a CDR3 of the light chain variable region sequence set forth in SEQ ID NO:27, and a heavy chain variable region comprising a CDR1, a CDR2, and a CDR3 of the heavy chain variable region sequence set forth in SEQ ID NO:28;
(ai) a light chain variable region comprising a CDR1, a CDR2, and a CDR3 of the light chain variable region sequence set forth in SEQ ID NO:31, and a heavy chain variable region comprising a CDR1, a CDR2, and a CDR3 of the heavy chain variable region sequence set forth in SEQ ID NO:32;
(aj) a light chain variable region comprising a CDR1, a CDR2, and a CDR3 of the light chain variable region sequence set forth in SEQ ID NO:35, and a heavy chain variable region comprising a CDR1, a CDR2, and a CDR3 of the heavy chain variable region sequence set forth in SEQ ID NO:36;
(ak) a light chain variable region comprising a CDR1, a CDR2, and a CDR3 of the light chain variable region sequence set forth in SEQ ID NO:39, and a heavy chain variable region comprising a CDR1, a CDR2, and a CDR3 of the heavy chain variable region sequence set forth in SEQ ID NO:40;
(al) a light chain variable region comprising a CDR1, a CDR2, and a CDR3 of the light chain variable region sequence set forth in SEQ ID NO:43, and a heavy chain variable region comprising a CDR1, a CDR2, and a CDR3 of the heavy chain variable region sequence set forth in SEQ ID NO:44;
(am) a light chain variable region comprising a CDR1, a CDR2, and a CDR3 of the light chain variable region sequence set forth in SEQ ID NO:47, and a heavy chain variable region comprising a CDR1, a CDR2, and a CDR3 of the heavy chain variable region sequence set forth in SEQ ID NO:48;
(an) a light chain variable region comprising a CDR1, a CDR2, and a CDR3 of the light chain variable region sequence set forth in SEQ ID NO:51, and a heavy chain variable region comprising a CDR1, a CDR2, and a CDR3 of the heavy chain variable region sequence set forth in SEQ ID NO:52;
(ao) a light chain variable region comprising a CDR1, a CDR2, and a CDR3 of the light chain variable region sequence set forth in SEQ ID NO:55, and a heavy chain variable region comprising a CDR1, a CDR2, and a CDR3 of the heavy chain variable region sequence set forth in SEQ ID NO:56;
(ap) a light chain variable region comprising a CDR1, a CDR2, and a CDR3 of the light chain variable region sequence set forth in SEQ ID NO:59, and a heavy chain variable region comprising a CDR1, a CDR2, and a CDR3 of the heavy chain variable region sequence set forth in SEQ ID NO:60;
(aq) a light chain variable region comprising a CDR1, a CDR2, and a CDR3 of the light chain variable region sequence set forth in SEQ ID NO:63, and a heavy chain variable region comprising a CDR1, a CDR2, and a CDR3 of the heavy chain variable region sequence set forth in SEQ ID NO:64;
(ar) a light chain variable region comprising a CDR1, a CDR2, and a CDR3 of the light chain variable region sequence set forth in SEQ ID NO:67, and a heavy chain variable region comprising a CDR1, a CDR2, and a CDR3 of the heavy chain variable region sequence set forth in SEQ ID NO:68;
(as) a light chain variable region comprising a CDR1, a CDR2, and a CDR3 of the light chain variable region sequence set forth in SEQ ID NO:71, and a heavy chain variable region comprising a CDR1, a CDR2, and a CDR3 of the heavy chain variable region sequence set forth in SEQ ID NO:72;
(at) a light chain variable region comprising a CDR1, a CDR2, and a CDR3 of the light chain variable region sequence set forth in SEQ ID NO:75, and a heavy chain variable region comprising a CDR1, a CDR2, and a CDR3 of the heavy chain variable region sequence set forth in SEQ ID NO:76;
(au) a light chain variable region comprising a CDR1, a CDR2, and a CDR3 of the light chain variable region sequence set forth in SEQ ID NO:79, and a heavy chain variable region comprising a CDR1, a CDR2, and a CDR3 of the heavy chain variable region sequence set forth in SEQ ID NO:80;
(av) a light chain variable region comprising a CDR1, a CDR2, and a CDR3 of the light chain variable region sequence set forth in SEQ ID NO:83, and a heavy chain variable region comprising a CDR1, a CDR2, and a CDR3 of the heavy chain variable region sequence set forth in SEQ ID NO:84;
(aw) a light chain variable region comprising a CDR1, a CDR2, and a CDR3 of the light chain variable region sequence set forth in SEQ ID NO:87, and a heavy chain variable region comprising a CDR1, a CDR2, and a CDR3 of the heavy chain variable region sequence set forth in SEQ ID NO:88;
(ax) a light chain variable region comprising a CDR1, a CDR2, and a CDR3 of the light chain variable region sequence set forth in SEQ ID NO:91, and a heavy chain variable region comprising a CDR1, a CDR2, and a CDR3 of the heavy chain variable region sequence set forth in SEQ ID NO:92;
(ay) a light chain variable region comprising a CDR1, a CDR2, and a CDR3 of the light chain variable region sequence set forth in SEQ ID NO:95, and a heavy chain variable region comprising a CDR1, a CDR2, and a CDR3 of the heavy chain variable region sequence set forth in SEQ ID NO:96;
(az) a light chain variable region comprising a CDR1, a CDR2, and a CDR3 of the light chain variable region sequence set forth in SEQ ID NO:99, and a heavy chain variable region comprising a CDR1, a CDR2, and a CDR3 of the heavy chain variable region sequence set forth in SEQ ID NO:100;
(ba) a light chain variable region comprising a CDR1, a CDR2, and a CDR3 of the light chain variable region sequence set forth in SEQ ID NO:103, and a heavy chain variable region comprising a CDR1, a CDR2, and a CDR3 of the heavy chain variable region sequence set forth in SEQ ID NO:104;
(bb) a light chain variable region comprising a CDR1, a CDR2, and a CDR3 of the light chain variable region sequence set forth in SEQ ID NO:107, and a heavy chain variable region comprising a CDR1, a CDR2, and a CDR3 of the heavy chain variable region sequence set forth in SEQ ID NO:108;
(bc) a light chain variable region comprising a CDR1, a CDR2, and a CDR3 of the light chain variable region sequence set forth in SEQ ID NO:111, and a heavy chain variable region comprising a CDR1, a CDR2, and a CDR3 of the heavy chain variable region sequence set forth in SEQ ID NO:112;
(be) a light chain variable region comprising a CDR1, a CDR2, and a CDR3 of the light chain variable region sequence set forth in SEQ ID NO:119, and a heavy chain variable region comprising a CDR1, a CDR2, and a CDR3 of the heavy chain variable region sequence set forth in SEQ ID NO:120;
(bf) a light chain variable region comprising a CDR1, a CDR2, and a CDR3 of the light chain variable region sequence set forth in SEQ ID NO:123, and a heavy chain variable region comprising a CDR1, a CDR2, and a CDR3 of the heavy chain variable region sequence set forth in SEQ ID NO:124;
(bg) a light chain variable region comprising a CDR1, a CDR2, and a CDR3 of the light chain variable region sequence set forth in SEQ ID NO:127, and a heavy chain variable region comprising a CDR1, a CDR2, and a CDR3 of the heavy chain variable region sequence set forth in SEQ ID NO:128;
(bh) a light chain variable region comprising a CDR1, a CDR2, and a CDR3 of the light chain variable region sequence set forth in SEQ ID NO:131, and a heavy chain variable region comprising a CDR1, a CDR2, and a CDR3 of the heavy chain variable region sequence set forth in SEQ ID NO:132;
(bi) a light chain variable region comprising a CDR1, a CDR2, and a CDR3 of the light chain variable region sequence set forth in SEQ ID NO:135, and a heavy chain variable region comprising a CDR1, a CDR2, and a CDR3 of the heavy chain variable region sequence set forth in SEQ ID NO:136;
(bj) a light chain variable region comprising a CDR1, a CDR2, and a CDR3 of the light chain variable region sequence set forth in SEQ ID NO:139, and a heavy chain variable region comprising a CDR1, a CDR2, and a CDR3 of the heavy chain variable region sequence set forth in SEQ ID NO:140;
(bl) a light chain variable region comprising a CDR1, a CDR2, and a CDR3 of the light chain variable region sequence set forth in SEQ ID NO:147, and a heavy chain variable region comprising a CDR1, a CDR2, and a CDR3 of the heavy chain variable region sequence set forth in SEQ ID NO:148;
(bm) a light chain variable region comprising a CDR1, a CDR2, and a CDR3 of the light chain variable region sequence set forth in SEQ ID NO:151, and a heavy chain variable region comprising a CDR1, a CDR2, and a CDR3 of the heavy chain variable region sequence set forth in SEQ ID NO:152;
(bn) a light chain variable region comprising a CDR1, a CDR2, and a CDR3 of the light chain variable region sequence set forth in SEQ ID NO:155, and a heavy chain variable region comprising a CDR1, a CDR2, and a CDR3 of the heavy chain variable region sequence set forth in SEQ ID NO:156;
(bo) a light chain variable region comprising a CDR1, a CDR2, and a CDR3 of the light chain variable region sequence set forth in SEQ ID NO:159, and a heavy chain variable region comprising a CDR1, a CDR2, and a CDR3 of the heavy chain variable region sequence set forth in SEQ ID NO:160;
(bp) a light chain variable region comprising a CDR1, a CDR2, and a CDR3 of the light chain variable region sequence set forth in SEQ ID NO:163, and a heavy chain variable region comprising a CDR1, a CDR2, and a CDR3 of the heavy chain variable region sequence set forth in SEQ ID NO:164;
(bq) a light chain variable region comprising a CDR1, a CDR2, and a CDR3 of the light chain variable region sequence set forth in SEQ ID NO:167, and a heavy chain variable region comprising a CDR1, a CDR2, and a CDR3 of the heavy chain variable region sequence set forth in SEQ ID NO:168;
(bs) a light chain variable region comprising a CDR1, a CDR2, and a CDR3 of the light chain variable region sequence set forth in SEQ ID NO:175, and a heavy chain variable region comprising a CDR1, a CDR2, and a CDR3 of the heavy chain variable region sequence set forth in SEQ ID NO:176;
(bt) a light chain variable region comprising a CDR1, a CDR2, and a CDR3 of the light chain variable region sequence set forth in SEQ ID NO:179, and a heavy chain variable region comprising a CDR1, a CDR2, and a CDR3 of the heavy chain variable region sequence set forth in SEQ ID NO:180;
(bu) a light chain variable region comprising a CDR1, a CDR2, and a CDR3 of the light chain variable region sequence set forth in SEQ ID NO:183, and a heavy chain variable region comprising a CDR1, a CDR2, and a CDR3 of the heavy chain variable region sequence set forth in SEQ ID NO:184;
(by) a light chain variable region comprising a CDR1, a CDR2, and a CDR3 of the light chain variable region sequence set forth in SEQ ID NO:187, and a heavy chain variable region comprising a CDR1, a CDR2, and a CDR3 of the heavy chain variable region sequence set forth in SEQ ID NO:188;
(bw) a light chain variable region comprising a CDR1, a CDR2, and a CDR3 of the light chain variable region sequence set forth in SEQ ID NO:191, and a heavy chain variable region comprising a CDR1, a CDR2, and a CDR3 of the heavy chain variable region sequence set forth in SEQ ID NO:192;
(bx) a light chain variable region comprising a CDR1, a CDR2, and a CDR3 of the light chain variable region sequence set forth in SEQ ID NO:195, and a heavy chain variable region comprising a CDR1, a CDR2, and a CDR3 of the heavy chain variable region sequence set forth in SEQ ID NO:196;
(by) a light chain variable region comprising a CDR1, a CDR2, and a CDR3 of the light chain variable region sequence set forth in SEQ ID NO:199, and a heavy chain variable region comprising a CDR1, a CDR2, and a CDR3 of the heavy chain variable region sequence set forth in SEQ ID NO:200;
(bz) a light chain variable region comprising a CDR1, a CDR2, and a CDR3 of the light chain variable region sequence set forth in SEQ ID NO:203, and a heavy chain variable region comprising a CDR1, a CDR2, and a CDR3 of the heavy chain variable region sequence set forth in SEQ ID NO:204;
(ca) a light chain variable region comprising a CDR1, a CDR2, and a CDR3 of the light chain variable region sequence set forth in SEQ ID NO:207, and a heavy chain variable region comprising a CDR1, a CDR2, and a CDR3 of the heavy chain variable region sequence set forth in SEQ ID NO:208;
(cb) a light chain variable region comprising a CDR1, a CDR2, and a CDR3 of the light chain variable region sequence set forth in SEQ ID NO:211, and a heavy chain variable region comprising a CDR1, a CDR2, and a CDR3 of the heavy chain variable region sequence set forth in SEQ ID NO:212;
(ce) a light chain variable region comprising a CDR1, a CDR2, and a CDR3 of the light chain variable region sequence set forth in SEQ ID NO:223, and a heavy chain variable region comprising a CDR1, a CDR2, and a CDR3 of the heavy chain variable region sequence set forth in SEQ ID NO:224;
(cf) a light chain variable region comprising a CDR1, a CDR2, and a CDR3 of the light chain variable region sequence set forth in SEQ ID NO:227, and a heavy chain variable region comprising a CDR1, a CDR2, and a CDR3 of the heavy chain variable region sequence set forth in SEQ ID NO:228;
(cg) a light chain variable region comprising a CDR1, a CDR2, and a CDR3 of the light chain variable region sequence set forth in SEQ ID NO:231, and a heavy chain variable region comprising a CDR1, a CDR2, and a CDR3 of the heavy chain variable region sequence set forth in SEQ ID NO:232;
(ci) a light chain variable region comprising a CDR1, a CDR2, and a CDR3 of the light chain variable region sequence set forth in SEQ ID NO:239, and a heavy chain variable region comprising a CDR1, a CDR2, and a CDR3 of the heavy chain variable region sequence set forth in SEQ ID NO:240;
(cj) a light chain variable region comprising a CDR1, a CDR2, and a CDR3 of the light chain variable region sequence set forth in SEQ ID NO:243, and a heavy chain variable region comprising a CDR1, a CDR2, and a CDR3 of the heavy chain variable region sequence set forth in SEQ ID NO:244;
(ck) a light chain variable region comprising a CDR1, a CDR2, and a CDR3 of the light chain variable region sequence set forth in SEQ ID NO:247, and a heavy chain variable region comprising a CDR1, a CDR2, and a CDR3 of the heavy chain variable region sequence set forth in SEQ ID NO:248;
(cl) a light chain variable region comprising a CDR1, a CDR2, and a CDR3 of the light chain variable region sequence set forth in SEQ ID NO:251, and a heavy chain variable region comprising a CDR1, a CDR2, and a CDR3 of the heavy chain variable region sequence set forth in SEQ ID NO:252;
(cm) a light chain variable region comprising a CDR1, a CDR2, and a CDR3 of the light chain variable region sequence set forth in SEQ ID NO:255, and a heavy chain variable region comprising a CDR1, a CDR2, and a CDR3 of the heavy chain variable region sequence set forth in SEQ ID NO:256;
(cn) a light chain variable region comprising a CDR1, a CDR2, and a CDR3 of the light chain variable region sequence set forth in SEQ ID NO:259, and a heavy chain variable region comprising a CDR1, a CDR2, and a CDR3 of the heavy chain variable region sequence set forth in SEQ ID NO:260;
(co) a light chain variable region comprising a CDR1, a CDR2, and a CDR3 of the light chain variable region sequence set forth in SEQ ID NO:263, and a heavy chain variable region comprising a CDR1, a CDR2, and a CDR3 of the heavy chain variable region sequence set forth in SEQ ID NO:264;
(cq) a light chain variable region comprising a CDR1, a CDR2, and a CDR3 of the light chain variable region sequence set forth in SEQ ID NO:271, and a heavy chain variable region comprising a CDR1, a CDR2, and a CDR3 of the heavy chain variable region sequence set forth in SEQ ID NO:272;
(cr) a light chain variable region comprising a CDR1, a CDR2, and a CDR3 of the light chain variable region sequence set forth in SEQ ID NO:275, and a heavy chain variable region comprising a CDR1, a CDR2, and a CDR3 of the heavy chain variable region sequence set forth in SEQ ID NO:276;
(cs) a light chain variable region comprising a CDR1, a CDR2, and a CDR3 of the light chain variable region sequence set forth in SEQ ID NO:279, and a heavy chain variable region comprising a CDR1, a CDR2, and a CDR3 of the heavy chain variable region sequence set forth in SEQ ID NO:280;
(ct) a light chain variable region comprising a CDR1, a CDR2, and a CDR3 of the light chain variable region sequence set forth in SEQ ID NO:283, and a heavy chain variable region comprising a CDR1, a CDR2, and a CDR3 of the heavy chain variable region sequence set forth in SEQ ID NO:284;
(cu) a light chain variable region comprising a CDR1, a CDR2, and a CDR3 of the light chain variable region sequence set forth in SEQ ID NO:287, and a heavy chain variable region comprising a CDR1, a CDR2, and a CDR3 of the heavy chain variable region sequence set forth in SEQ ID NO:288;
(cv) a light chain variable region comprising a CDR1, a CDR2, and a CDR3 of the light chain variable region sequence set forth in SEQ ID NO:291, and a heavy chain variable region comprising a CDR1, a CDR2, and a CDR3 of the heavy chain variable region sequence set forth in SEQ ID NO:292;
(cw) a light chain variable region comprising a CDR1, a CDR2, and a CDR3 of the light chain variable region sequence set forth in SEQ ID NO:303, and a heavy chain variable region comprising a CDR1, a CDR2, and a CDR3 of the heavy chain variable region sequence set forth in SEQ ID NO:304;
(cx) a light chain variable region comprising a CDR1, a CDR2, and a CDR3 of the light chain variable region sequence set forth in SEQ ID NO:295, and a heavy chain variable region comprising a CDR1, a CDR2, and a CDR3 of the heavy chain variable region sequence set forth in SEQ ID NO:296;
(cy) a light chain variable region comprising a CDR1, a CDR2, and a CDR3 of the light chain variable region sequence set forth in SEQ ID NO:917, and a heavy chain variable region comprising a CDR1, a CDR2, and a CDR3 of the heavy chain variable region sequence set forth in SEQ ID NO:915; or
(cz) a light chain variable region comprising a CDR1, a CDR2, and a CDR3 of the light chain variable region sequence set forth in SEQ ID NO:921, and a heavy chain variable region comprising a CDR1, a CDR2, and a CDR3 of the heavy chain variable region sequence set forth in SEQ ID NO:919.

2. The CAR of claim 1, wherein:
(ab) the light chain variable region comprises a CDR1 comprising the amino acid sequence set forth in SEQ ID NO:318, a CDR2 comprising the amino acid sequence set forth in SEQ ID NO:319, and a CDR3 comprising the amino acid sequence set forth in SEQ ID NO:320; and the heavy chain variable region comprises a CDR1 comprising the amino acid sequence set forth in SEQ ID NO:315, a CDR2 comprising the amino acid sequence set forth in SEQ ID NO:316, and a CDR3 comprising the amino acid sequence set forth in SEQ ID NO:317;
(ac) the light chain variable region comprises a CDR1 comprising the amino acid sequence set forth in SEQ ID NO:324, a CDR2 comprising the amino acid sequence set forth in SEQ ID NO:319, and a CDR3 comprising the amino acid sequence set forth in SEQ ID NO:325; and the heavy chain variable region comprises a CDR1 comprising the amino acid sequence set forth in SEQ ID NO:321, a CDR2 comprising the amino acid sequence set forth in SEQ ID NO:322, and a CDR3 comprising the amino acid sequence set forth in SEQ ID NO:323;
(ad) the light chain variable region comprises a CDR1 comprising the amino acid sequence set forth in SEQ ID NO:329, a CDR2 comprising the amino acid sequence set forth in SEQ ID NO:330, and a CDR3 comprising the amino acid sequence set forth in SEQ ID NO:331; and the heavy chain variable region comprises a CDR1 comprising the amino acid sequence set forth in SEQ ID NO:326, a CDR2 comprising the amino acid sequence set forth in SEQ ID NO:327, and a CDR3 comprising the amino acid sequence set forth in SEQ ID NO:328;
(ae) the light chain variable region comprises a CDR1 comprising the amino acid sequence set forth in SEQ ID NO:329, a CDR2 comprising the amino acid sequence set forth in SEQ ID NO:330, and a CDR3 comprising the amino acid sequence set forth in SEQ ID NO:331; and the heavy chain variable region comprises a CDR1 comprising the amino acid sequence set forth in SEQ ID NO:332, a CDR2 comprising the amino acid sequence set forth in SEQ ID NO:333, and a CDR3 comprising the amino acid sequence set forth in SEQ ID NO:334;
(af) the light chain variable region comprises a CDR1 comprising the amino acid sequence set forth in SEQ ID NO:338, a CDR2 comprising the amino acid sequence set forth in SEQ ID NO:330, and a CDR3 comprising the amino acid sequence set forth in SEQ ID NO:339; and the heavy chain variable region comprises a CDR1 comprising the amino acid sequence set forth in SEQ ID NO:335, a CDR2 comprising the amino acid sequence set forth in SEQ ID NO:336, and a CDR3 comprising the amino acid sequence set forth in SEQ ID NO:337;
(ag) the light chain variable region comprises a CDR1 comprising the amino acid sequence set forth in SEQ ID NO:343, a CDR2 comprising the amino acid sequence set forth in SEQ ID NO:344, and a CDR3 comprising the amino acid sequence set forth in SEQ ID NO:345; and the heavy chain variable region comprises a CDR1 comprising the amino acid sequence set forth in SEQ ID NO:340, a CDR2 comprising the amino acid sequence set forth in SEQ ID NO:341, and a CDR3 comprising the amino acid sequence set forth in SEQ ID NO:342;
(ah) the light chain variable region comprises a CDR1 comprising the amino acid sequence set forth in SEQ ID NO:348, a CDR2 comprising the amino acid sequence set forth in SEQ ID NO:349, and a CDR3 comprising the amino acid sequence set forth in SEQ ID NO:350; and the heavy chain variable region comprises a CDR1 comprising the amino acid sequence set forth in SEQ ID NO:346, a CDR2 comprising the amino acid sequence set forth in SEQ ID NO:327, and a CDR3 comprising the amino acid sequence set forth in SEQ ID NO:347;
(ai) the light chain variable region comprises a CDR1 comprising the amino acid sequence set forth in SEQ ID NO:352, a CDR2 comprising the amino acid sequence set forth in SEQ ID NO:344, and a CDR3 comprising the amino acid sequence set forth in SEQ ID NO:353; and the heavy chain variable region comprises a CDR1 comprising the amino acid sequence set forth in SEQ ID NO:346, a CDR2 comprising the amino acid sequence set forth in SEQ ID NO:327, and a CDR3 comprising the amino acid sequence set forth in SEQ ID NO:351;
(aj) the light chain variable region comprises a CDR1 comprising the amino acid sequence set forth in SEQ ID NO:357, a CDR2 comprising the amino acid sequence set forth in SEQ ID NO:358, and a CDR3 comprising the amino acid sequence set forth in SEQ ID NO:359; and the heavy chain variable region comprises a CDR1 comprising the amino acid sequence set forth in SEQ ID NO:354, a CDR2 comprising the amino acid sequence set forth in SEQ ID NO:355, and a CDR3 comprising the amino acid sequence set forth in SEQ ID NO:356;
(ak) the light chain variable region comprises a CDR1 comprising the amino acid sequence set forth in SEQ ID NO:363, a CDR2 comprising the amino acid sequence set forth in SEQ ID NO:364, and a CDR3 comprising the amino acid sequence set forth in SEQ ID NO:365; and the heavy chain variable region comprises a CDR1 comprising the amino acid sequence set forth in SEQ ID NO:360, a CDR2 comprising the amino acid sequence set forth in SEQ ID NO:361, and a CDR3 comprising the amino acid sequence set forth in SEQ ID NO:362;
(al) the light chain variable region comprises a CDR1 comprising the amino acid sequence set forth in SEQ ID NO:369, a CDR2 comprising the amino acid sequence set forth in SEQ ID NO:370, and a CDR3 comprising the amino acid sequence set forth in SEQ ID NO:371; and the heavy chain variable region comprises a CDR1 comprising the amino acid sequence set forth in SEQ ID NO:366, a CDR2 comprising the amino acid sequence set forth in SEQ ID NO:367, and a CDR3 comprising the amino acid sequence set forth in SEQ ID NO:368;
(am) the light chain variable region comprises a CDR1 comprising the amino acid sequence set forth in SEQ ID NO:329, a CDR2 comprising the amino acid sequence set forth in SEQ ID NO:330, and a CDR3 comprising the amino acid sequence set forth in SEQ ID NO:375; and the heavy chain variable region comprisesa CDR1 comprising the amino acid sequence set forth in SEQ ID NO:372, a CDR2 comprising the amino acid sequence set forth in SEQ ID NO:373, and a CDR3 comprising the amino acid sequence set forth in SEQ ID NO:374;
(an) the light chain variable region comprises a CDR1 comprising the amino acid sequence set forth in SEQ ID NO:329, a CDR2 comprising the amino acid sequence set forth in SEQ ID NO:330, and a CDR3 comprising the amino acid sequence set forth in SEQ ID NO:377; and the heavy chain variable region comprises a CDR1 comprising the amino acid sequence set forth in SEQ ID NO:346, a CDR2 comprising the amino acid sequence set forth in SEQ ID NO:327, and a CDR3 comprising the amino acid sequence set forth in SEQ ID NO:376;
(ao) the light chain variable region comprises a CDR1 comprising the amino acid sequence set forth in SEQ ID NO:381, a CDR2 comprising the amino acid sequence set forth in SEQ ID NO:382, and a CDR3 comprising the amino acid sequence set forth in SEQ ID NO:383; and the heavy chain variable region comprises a CDR1 comprising the amino acid sequence set forth in SEQ ID NO:378, a CDR2 comprising the amino acid sequence set forth in SEQ ID NO:379, and a CDR3 comprising the amino acid sequence set forth in SEQ ID NO:380;
(ap) the light chain variable region comprises a CDR1 comprising the amino acid sequence set forth in SEQ ID NO:329, a CDR2 comprising the amino acid sequence set forth in SEQ ID NO:385, and a CDR3 comprising the amino acid sequence set forth in SEQ ID NO:386; and the heavy chain variable region comprises a CDR1 comprising the amino acid sequence set forth in SEQ ID NO:309, a CDR2 comprising the amino acid sequence set forth in SEQ ID NO:310, and a CDR3 comprising the amino acid sequence set forth in SEQ ID NO:384;
(aq) the light chain variable region comprises a CDR1 comprising the amino acid sequence set forth in SEQ ID NO:390, a CDR2 comprising the amino acid sequence set forth in SEQ ID NO:391, and a CDR3 comprising the amino acid sequence set forth in SEQ ID NO:392; and the heavy chain variable region comprises a CDR1 comprising the amino acid sequence set forth in SEQ ID NO:387, a CDR2 comprising the amino acid sequence set forth in SEQ ID NO:388, and a CDR3 comprising the amino acid sequence set forth in SEQ ID NO:389;
(ar) the light chain variable region comprises a CDR1 comprising the amino acid sequence set forth in SEQ ID NO:318, a CDR2 comprising the amino acid sequence set forth in SEQ ID NO:319, and a CDR3 comprising the amino acid sequence set forth in SEQ ID NO:395; and the heavy chain variable region comprises a CDR1 comprising the amino acid sequence set forth in SEQ ID NO:393, a CDR2 comprising the amino acid sequence set forth in SEQ ID NO:355, and a CDR3 comprising the amino acid sequence set forth in SEQ ID NO:394;
(as) the light chain variable region comprises a CDR1 comprising the amino acid sequence set forth in SEQ ID NO:397, a CDR2 comprising the amino acid sequence set forth in SEQ ID NO:398, and a CDR3 comprising the amino acid sequence set forth in SEQ ID NO:399; and the heavy chain variable region comprises a CDR1 comprising the amino acid sequence set forth in SEQ ID NO:346, a CDR2 comprising the amino acid sequence set forth in SEQ ID NO:327, and a CDR3 comprising the amino acid sequence set forth in SEQ ID NO:396;
(at) the light chain variable region comprises a CDR1 comprising the amino acid sequence set forth in SEQ ID NO:401, a CDR2 comprising the amino acid sequence set forth in SEQ ID NO:398, and a CDR3 comprising the amino acid sequence set forth in SEQ ID NO:402; and the heavy chain variable region comprises a CDR1 comprising the amino acid sequence set forth in SEQ ID NO:346, a CDR2 comprising the amino acid sequence set forth in SEQ ID NO:327, and a CDR3 comprising the amino acid sequence set forth in SEQ ID NO:400;
(au) the light chain variable region comprises a CDR1 comprising the amino acid sequence set forth in SEQ ID NO:406, a CDR2 comprising the amino acid sequence set forth in SEQ ID NO:398, and a CDR3 comprising the amino acid sequence set forth in SEQ ID NO:407; and the heavy chain variable region comprises a CDR1 comprising the amino acid sequence set forth in SEQ ID NO:403, a CDR2 comprising the amino acid sequence set forth in SEQ ID NO:404, and a CDR3 comprising the amino acid sequence set forth in SEQ ID NO:405;
(av) the light chain variable region comprises a CDR1 comprising the amino acid sequence set forth in SEQ ID NO:329, a CDR2 comprising the amino acid sequence set forth in SEQ ID NO:409, and a CDR3 comprising the amino acid sequence set forth in SEQ ID NO:410; and the heavy chain variable region comprises a CDR1 comprising the amino acid sequence set forth in SEQ ID NO:346, a CDR2 comprising the amino acid sequence set forth in SEQ ID NO:327, and a CDR3 comprising the amino acid sequence set forth in SEQ ID NO:408;
(aw) the light chain variable region comprises a CDR1 comprising the amino acid sequence set forth in SEQ ID NO:318, a CDR2 comprising the amino acid sequence set forth in SEQ ID NO:319, and a CDR3 comprising the amino acid sequence set forth in SEQ ID NO:414; and the heavy chain variable region comprises a CDR1 comprising the amino acid sequence set forth in SEQ ID NO:411, a CDR2 comprising the amino acid sequence set forth in SEQ ID NO:412, and a CDR3 comprising the amino acid sequence set forth in SEQ ID NO:413;
(ax) the light chain variable region comprises a CDR1 comprising the amino acid sequence set forth in SEQ ID NO:416, a CDR2 comprising the amino acid sequence set forth in SEQ ID NO:417, and a CDR3 comprising the amino acid sequence set forth in SEQ ID NO:418; and the heavy chain variable region comprises a CDR1 comprising the amino acid sequence set forth in SEQ ID NO:411, a CDR2 comprising the amino acid sequence set forth in SEQ ID NO:412, and a CDR3 comprising the amino acid sequence set forth in SEQ ID NO:415;
(ay) the light chain variable region comprises a CDR1 comprising the amino acid sequence set forth in SEQ ID NO:318, a CDR2 comprising the amino acid sequence set forth in SEQ ID NO:319, and a CDR3 comprising the amino acid sequence set forth in SEQ ID NO:419; and the heavy chain variable region comprises a CDR1 comprising the amino acid sequence set forth in SEQ ID NO:411, a CDR2 comprising the amino acid sequence set forth in SEQ ID NO:412, and a CDR3 comprising the amino acid sequence set forth in SEQ ID NO:349;
(az) the light chain variable region comprises a CDR1 comprising the amino acid sequence set forth in SEQ ID NO:423, a CDR2 comprising the amino acid sequence set forth in SEQ ID NO:358, and a CDR3 comprising the amino acid sequence set forth in SEQ ID NO:424; and the heavy chain variable region comprises a CDR1 comprising the amino acid sequence set forth in SEQ ID NO:420, a CDR2 comprising the amino acid sequence set forth in SEQ ID NO:421, and a CDR3 comprising the amino acid sequence set forth in SEQ ID NO:422;
(ba) the light chain variable region comprises a CDR1 comprising the amino acid sequence set forth in SEQ ID NO:428, a CDR2 comprising the amino acid sequence set forth in SEQ ID NO:429, and a CDR3 comprising the amino acid sequence set forth in SEQ ID NO:430; and the heavy chain variable region comprises a CDR1 comprising the amino acid sequence set forth in SEQ ID NO:425, a CDR2 comprising the amino acid sequence set forth in SEQ ID NO:426, and a CDR3 comprising the amino acid sequence set forth in SEQ ID NO:427;
(bb) the light chain variable region comprises a CDR1 comprising the amino acid sequence set forth in SEQ ID NO:433, a CDR2 comprising the amino acid sequence set forth in SEQ ID NO:434, and a CDR3 comprising the amino acid sequence set forth in SEQ ID NO:435; and the heavy chain variable region comprises a CDR1 comprising the amino acid sequence set forth in SEQ ID NO:372, a CDR2 comprising the amino acid sequence set forth in SEQ ID NO:431, and a CDR3 comprising the amino acid sequence set forth in SEQ ID NO:432;
(bc) the light chain variable region comprises a CDR1 comprising the amino acid sequence set forth in SEQ ID NO:423, a CDR2 comprising the amino acid sequence set forth in SEQ ID NO:438, and a CDR3 comprising the amino acid sequence set forth in SEQ ID NO:439; and the heavy chain variable region comprises a CDR1 comprising the amino acid sequence set forth in SEQ ID NO:436, a CDR2 comprising the amino acid sequence set forth in SEQ ID NO:388, and a CDR3 comprising the amino acid sequence set forth in SEQ ID NO:437;
(be) the light chain variable region comprises a CDR1 comprising the amino acid sequence set forth in SEQ ID NO:447, a CDR2 comprising the amino acid sequence set forth in SEQ ID NO:448, and a CDR3 comprising the amino acid sequence set forth in SEQ ID NO:449; and the heavy chain variable region comprises a CDR1 comprising the amino acid sequence set forth in SEQ ID NO:444, a CDR2 comprising the amino acid sequence set forth in SEQ ID NO:445, and a CDR3 comprising the amino acid sequence set forth in SEQ ID NO:446;
(bf) the light chain variable region comprises a CDR1 comprising the amino acid sequence set forth in SEQ ID NO:318, a CDR2 comprising the amino acid sequence set forth in SEQ ID NO:319, and a CDR3 comprising the amino acid sequence set forth in SEQ ID NO:452; and the heavy chain variable region comprises a CDR1 comprising the amino acid sequence set forth in SEQ ID NO:309, a CDR2 comprising the amino acid sequence set forth in SEQ ID NO:450, and a CDR3 comprising the amino acid sequence set forth in SEQ ID NO:451;
(bg) the light chain variable region comprises a CDR1 comprising the amino acid sequence set forth in SEQ ID NO:369, a CDR2 comprising the amino acid sequence set forth in SEQ ID NO:454, and a CDR3 comprising the amino acid sequence set forth in SEQ ID NO:455; and the heavy chain variable region comprises a CDR1 comprising the amino acid sequence set forth in SEQ ID NO:411, a CDR2 comprising the amino acid sequence set forth in SEQ ID NO:412, and a CDR3 comprising the amino acid sequence set forth in SEQ ID NO:453;
(bh) the light chain variable region comprises a CDR1 comprising the amino acid sequence set forth in SEQ ID NO:318, a CDR2 comprising the amino acid sequence set forth in SEQ ID NO:319, and a CDR3 comprising the amino acid sequence set forth in SEQ ID NO:457; and the heavy chain variable region comprises a CDR1 comprising the amino acid sequence set forth in SEQ ID NO:411, a CDR2 comprising the amino acid sequence set forth in SEQ ID NO:412, and a CDR3 comprising the amino acid sequence set forth in SEQ ID NO:456;
(bi) the light chain variable region comprises a CDR1 comprising the amino acid sequence set forth in SEQ ID NO:329, a CDR2 comprising the amino acid sequence set forth in SEQ ID NO:330, and a CDR3 comprising the amino acid sequence set forth in SEQ ID NO:331; and the heavy chain variable region comprises a CDR1 comprising the amino acid sequence set forth in SEQ ID NO:346, a CDR2 comprising the amino acid sequence set forth in SEQ ID NO:327, and a CDR3 comprising the amino acid sequence set forth in SEQ ID NO:458;
(bj) the light chain variable region comprises a CDR1 comprising the amino acid sequence set forth in SEQ ID NO:460, a CDR2 comprising the amino acid sequence set forth in SEQ ID NO:461, and a CDR3 comprising the amino acid sequence set forth in SEQ ID NO:462; and the heavy chain variable region comprises a CDR1 comprising the amino acid sequence set forth in SEQ ID NO:411, a CDR2 comprising the amino acid sequence set forth in SEQ ID NO:412, and a CDR3 comprising the amino acid sequence set forth in SEQ ID NO:459;
(bl) the light chain variable region comprises a CDR1 comprising the amino acid sequence set forth in SEQ ID NO:423, a CDR2 comprising the amino acid sequence set forth in SEQ ID NO:438, and a CDR3 comprising the amino acid sequence set forth in SEQ ID NO:465; and the heavy chain variable region comprises a CDR1 comprising the amino acid sequence set forth in SEQ ID NO:436, a CDR2 comprising the amino acid sequence set forth in SEQ ID NO:388, and a CDR3 comprising the amino acid sequence set forth in SEQ ID NO:464;
(bm) the light chain variable region comprises a CDR1 comprising the amino acid sequence set forth in SEQ ID NO:468, a CDR2 comprising the amino acid sequence set forth in SEQ ID NO:469, and a CDR3 comprising the amino acid sequence set forth in SEQ ID NO:470; and the heavy chain variable region comprises a CDR1 comprising the amino acid sequence set forth in SEQ ID NO:411, a CDR2 comprising the amino acid sequence set forth in SEQ ID NO:466, and a CDR3 comprising the amino acid sequence set forth in SEQ ID NO:467;
(bn) the light chain variable region comprises a CDR1 comprising the amino acid sequence set forth in SEQ ID NO:474, a CDR2 comprising the amino acid sequence set forth in SEQ ID NO:358, and a CDR3 comprising the amino acid sequence set forth in SEQ ID NO:465; and the heavy chain variable region comprises a CDR1 comprising the amino acid sequence set forth in SEQ ID NO:471, a CDR2 comprising the amino acid sequence set forth in SEQ ID NO:472, and a CDR3 comprising the amino acid sequence set forth in SEQ ID NO:473;
(bo) the light chain variable region comprises a CDR1 comprising the amino acid sequence set forth in SEQ ID NO:477, a CDR2 comprising the amino acid sequence set forth in SEQ ID NO:478, and a CDR3 comprising the amino acid sequence set forth in SEQ ID NO:479; and the heavy chain variable region comprises a CDR1 comprising the amino acid sequence set forth in SEQ ID NO:372, a CDR2 comprising the amino acid sequence set forth in SEQ ID NO:475, and a CDR3 comprising the amino acid sequence set forth in SEQ ID NO:476;
(bp) the light chain variable region comprises a CDR1 comprising the amino acid sequence set forth in SEQ ID NO:483, a CDR2 comprising the amino acid sequence set forth in SEQ ID NO:484, and a CDR3 comprising the amino acid sequence set forth in SEQ ID NO:485; and the heavy chain variable region comprises a CDR1 comprising the amino acid sequence set forth in SEQ ID NO:480, a CDR2 comprising the amino acid sequence set forth in SEQ ID NO:481, and a CDR3 comprising the amino acid sequence set forth in SEQ ID NO:482;
(bq) the light chain variable region comprises a CDR1 comprising the amino acid sequence set forth in SEQ ID NO:433, a CDR2 comprising the amino acid sequence set forth in SEQ ID NO:487, and a CDR3 comprising the amino acid sequence set forth in SEQ ID NO:488; and the heavy chain variable region comprises a CDR1 comprising the amino acid sequence set forth in SEQ ID NO:346, a CDR2 comprising the amino acid sequence set forth in SEQ ID NO:327, and a CDR3 comprising the amino acid sequence set forth in SEQ ID NO:486;
(bs) the light chain variable region comprises a CDR1 comprising the amino acid sequence set forth in SEQ ID NO:312, a CDR2 comprising the amino acid sequence set forth in SEQ ID NO:313, and a CDR3 comprising the amino acid sequence set forth in SEQ ID NO:493; and the heavy chain variable region comprises a CDR1 comprising the amino acid sequence set forth in SEQ ID NO:309, a CDR2 comprising the amino acid sequence set forth in SEQ ID NO:310, and a CDR3 comprising the amino acid sequence set forth in SEQ ID NO:492;
(bt) the light chain variable region comprises a CDR1 comprising the amino acid sequence set forth in SEQ ID NO:490, a CDR2 comprising the amino acid sequence set forth in SEQ ID NO:349, and a CDR3 comprising the amino acid sequence set forth in SEQ ID NO:495; and the heavy chain variable region comprises a CDR1 comprising the amino acid sequence set forth in SEQ ID NO:403, a CDR2 comprising the amino acid sequence set forth in SEQ ID NO:404, and a CDR3 comprising the amino acid sequence set forth in SEQ ID NO:494;
(bu) the light chain variable region comprises a CDR1 comprising the amino acid sequence set forth in SEQ ID NO:498, a CDR2 comprising the amino acid sequence set forth in SEQ ID NO:344, and a CDR3 comprising the amino acid sequence set forth in SEQ ID NO:499; and the heavy chain variable region comprises a CDR1 comprising the amino acid sequence set forth in SEQ ID NO:403, a CDR2 comprising the amino acid sequence set forth in SEQ ID NO:496, and a CDR3 comprising the amino acid sequence set forth in SEQ ID NO:497;
(by) the light chain variable region comprises a CDR1 comprising the amino acid sequence set forth in SEQ ID NO:503, a CDR2 comprising the amino acid sequence set forth in SEQ ID NO:504, and a CDR3 comprising the amino acid sequence set forth in SEQ ID NO:505; and the heavy chain variable region comprises a CDR1 comprising the amino acid sequence set forth in SEQ ID NO:500, a CDR2 comprising the amino acid sequence set forth in SEQ ID NO:501, and a CDR3 comprising the amino acid sequence set forth in SEQ ID NO:502;
(bw) the light chain variable region comprises a CDR1 comprising the amino acid sequence set forth in SEQ ID NO:508, a CDR2 comprising the amino acid sequence set forth in SEQ ID NO:349, and a CDR3 comprising the amino acid sequence set forth in SEQ ID NO:509; and the heavy chain variable region comprises a CDR1 comprising the amino acid sequence set forth in SEQ ID NO:403, a CDR2 comprising the amino acid sequence set forth in SEQ ID NO:506, and a CDR3 comprising the amino acid sequence set forth in SEQ ID NO:507;
(bx) the light chain variable region comprises a CDR1 comprising the amino acid sequence set forth in SEQ ID NO:312, a CDR2 comprising the amino acid sequence set forth in SEQ ID NO:513, and a CDR3 comprising the amino acid sequence set forth in SEQ ID NO:514; and the heavy chain variable region comprises a CDR1 comprising the amino acid sequence set forth in SEQ ID NO:510, a CDR2 comprising the amino acid sequence set forth in SEQ ID NO:511, and a CDR3 comprising the amino acid sequence set forth in SEQ ID NO:512;
(by) the light chain variable region comprises a CDR1 comprising the amino acid sequence set forth in SEQ ID NO:518, a CDR2 comprising the amino acid sequence set forth in SEQ ID NO:319, and a CDR3 comprising the amino acid sequence set forth in SEQ ID NO:519; and the heavy chain variable region comprises a CDR1 comprising the amino acid sequence set forth in SEQ ID NO:515, a CDR2 comprising the amino acid sequence set forth in SEQ ID NO:516, and a CDR3 comprising the amino acid sequence set forth in SEQ ID NO:517;
(bz) the light chain variable region comprises a CDR1 comprising the amino acid sequence set forth in SEQ ID NO:348, a CDR2 comprising the amino acid sequence set forth in SEQ ID NO:523, and a CDR3 comprising the amino acid sequence set forth in SEQ ID NO:524; and the heavy chain variable region comprises a CDR1 comprising the amino acid sequence set forth in SEQ ID NO:520, a CDR2 comprising the amino acid sequence set forth in SEQ ID NO:521, and a CDR3 comprising the amino acid sequence set forth in SEQ ID NO:522;
(ca) the light chain variable region comprises a CDR1 comprising the amino acid sequence set forth in SEQ ID NO:406, a CDR2 comprising the amino acid sequence set forth in SEQ ID NO:398, and a CDR3 comprising the amino acid sequence set forth in SEQ ID NO:528; and the heavy chain variable region comprises a CDR1 comprising the amino acid sequence set forth in SEQ ID NO:525, a CDR2 comprising the amino acid sequence set forth in SEQ ID NO:526, and a CDR3 comprising the amino acid sequence set forth in SEQ ID NO:527;
(cb) the light chain variable region comprises a CDR1 comprising the amino acid sequence set forth in SEQ ID NO:318, a CDR2 comprising the amino acid sequence set forth in SEQ ID NO:319, and a CDR3 comprising the amino acid sequence set forth in SEQ ID NO:530; and the heavy chain variable region comprises a CDR1 comprising the amino acid sequence set forth in SEQ ID NO:411, a CDR2 comprising the amino acid sequence set forth in SEQ ID NO:412, and a CDR3 comprising the amino acid sequence set forth in SEQ ID NO:529;
(ce) the light chain variable region comprises a CDR1 comprising the amino acid sequence set forth in SEQ ID NO:428, a CDR2 comprising the amino acid sequence set forth in SEQ ID NO:429, and a CDR3 comprising the amino acid sequence set forth in SEQ ID NO:430; and the heavy chain variable region comprises a CDR1 comprising the amino acid sequence set forth in SEQ ID NO:425, a CDR2 comprising the amino acid sequence set forth in SEQ ID NO:426, and a CDR3 comprising the amino acid sequence set forth in SEQ ID NO:536;
(cf) the light chain variable region comprises a CDR1 comprising the amino acid sequence set forth in SEQ ID NO:540, a CDR2 comprising the amino acid sequence set forth in SEQ ID NO:398, and a CDR3 comprising the amino acid sequence set forth in SEQ ID NO:541; and the heavy chain variable region comprises a CDR1 comprising the amino acid sequence set forth in SEQ ID NO:537, a CDR2 comprising the amino acid sequence set forth in SEQ ID NO:538, and a CDR3 comprising the amino acid sequence set forth in SEQ ID NO:539;
(cg) the light chain variable region comprises a CDR1 comprising the amino acid sequence set forth in SEQ ID NO:406, a CDR2 comprising the amino acid sequence set forth in SEQ ID NO:398, and a CDR3 comprising the amino acid sequence set forth in SEQ ID NO:542; and the heavy chain variable region comprises a CDR1 comprising the amino acid sequence set forth in SEQ ID NO:537, a CDR2 comprising the amino acid sequence set forth in SEQ ID NO:538, and a CDR3 comprising the amino acid sequence set forth in SEQ ID NO:539;
(ci) the light chain variable region comprises a CDR1 comprising the amino acid sequence set forth in SEQ ID NO:547, a CDR2 comprising the amino acid sequence set forth in SEQ ID NO:548, and a CDR3 comprising the amino acid sequence set forth in SEQ ID NO:549; and the heavy chain variable region comprises a CDR1 comprising the amino acid sequence set forth in SEQ ID NO:411, a CDR2 comprising the amino acid sequence set forth in SEQ ID NO:412, and a CDR3 comprising the amino acid sequence set forth in SEQ ID NO:546;
(cj) the light chain variable region comprises a CDR1 comprising the amino acid sequence set forth in SEQ ID NO:312, a CDR2 comprising the amino acid sequence set forth in SEQ ID NO:313, and a CDR3 comprising the amino acid sequence set forth in SEQ ID NO:314; and the heavy chain variable region comprises a CDR1 comprising the amino acid sequence set forth in SEQ ID NO:309, a CDR2 comprising the amino acid sequence set forth in SEQ ID NO:310, and a CDR3 comprising the amino acid sequence set forth in SEQ ID NO:550;
(ck) the light chain variable region comprises a CDR1 comprising the amino acid sequence set forth in SEQ ID NO:312, a CDR2 comprising the amino acid sequence set forth in SEQ ID NO:513, and a CDR3 comprising the amino acid sequence set forth in SEQ ID NO:314; and the heavy chain variable region comprises a CDR1 comprising the amino acid sequence set forth in SEQ ID NO:309, a CDR2 comprising the amino acid sequence set forth in SEQ ID NO:310, and a CDR3 comprising the amino acid sequence set forth in SEQ ID NO:550;
(cl) the light chain variable region comprises a CDR1 comprising the amino acid sequence set forth in SEQ ID NO:406, a CDR2 comprising the amino acid sequence set forth in SEQ ID NO:398, and a CDR3 comprising the amino acid sequence set forth in SEQ ID NO:554; and the heavy chain variable region comprises a CDR1 comprising the amino acid sequence set forth in SEQ ID NO:551, a CDR2 comprising the amino acid sequence set forth in SEQ ID NO:552, and a CDR3 comprising the amino acid sequence set forth in SEQ ID NO:553;
(cm) the light chain variable region comprises a CDR1 comprising the amino acid sequence set forth in SEQ ID NO:556, a CDR2 comprising the amino acid sequence set forth in SEQ ID NO:557, and a CDR3 comprising the amino acid sequence set forth in SEQ ID NO:558; and the heavy chain variable region comprises a CDR1 comprising the amino acid sequence set forth in SEQ ID NO:309, a CDR2 comprising the amino acid sequence set forth in SEQ ID NO:310, and a CDR3 comprising the amino acid sequence set forth in SEQ ID NO:555;
(cn) the light chain variable region comprises a CDR1 comprising the amino acid sequence set forth in SEQ ID NO:562, a CDR2 comprising the amino acid sequence set forth in SEQ ID NO:563, and a CDR3 comprising the amino acid sequence set forth in SEQ ID NO:564; and the heavy chain variable region comprises a CDR1 comprising the amino acid sequence set forth in SEQ ID NO:559, a CDR2 comprising the amino acid sequence set forth in SEQ ID NO:560, and a CDR3 comprising the amino acid sequence set forth in SEQ ID NO:561;
(co) the light chain variable region comprises a CDR1 comprising the amino acid sequence set forth in SEQ ID NO:568, a CDR2 comprising the amino acid sequence set forth in SEQ ID NO:504, and a CDR3 comprising the amino acid sequence set forth in SEQ ID NO:569; and the heavy chain variable region comprises a CDR1 comprising the amino acid sequence set forth in SEQ ID NO:565, a CDR2 comprising the amino acid sequence set forth in SEQ ID NO:566, and a CDR3 comprising the amino acid sequence set forth in SEQ ID NO:567;
(cq) the light chain variable region comprises a CDR1 comprising the amino acid sequence set forth in SEQ ID NO:343, a CDR2 comprising the amino acid sequence set forth in SEQ ID NO:575, and a CDR3 comprising the amino acid sequence set forth in SEQ ID NO:576; and the heavy chain variable region comprises a CDR1 comprising the amino acid sequence set forth in SEQ ID NO:403, a CDR2 comprising the amino acid sequence set forth in SEQ ID NO:404, and a CDR3 comprising the amino acid sequence set forth in SEQ ID NO:574;
(cr) the light chain variable region comprises a CDR1 comprising the amino acid sequence set forth in SEQ ID NO:312, a CDR2 comprising the amino acid sequence set forth in SEQ ID NO:313, and a CDR3 comprising the amino acid sequence set forth in SEQ ID NO:314; and the heavy chain variable region comprises a CDR1 comprising the amino acid sequence set forth in SEQ ID NO:411, a CDR2 comprising the amino acid sequence set forth in SEQ ID NO:412, and a CDR3 comprising the amino acid sequence set forth in SEQ ID NO:577;
(cs) the light chain variable region comprises a CDR1 comprising the amino acid sequence set forth in SEQ ID NO:312, a CDR2 comprising the amino acid sequence set forth in SEQ ID NO:313, and a CDR3 comprising the amino acid sequence set forth in SEQ ID NO:314; and the heavy chain variable region comprises a CDR1 comprising the amino acid sequence set forth in SEQ ID NO:346, a CDR2 comprising the amino acid sequence set forth in SEQ ID NO:327, and a CDR3 comprising the amino acid sequence set forth in SEQ ID NO:578;
(ct) the light chain variable region comprises a CDR1 comprising the amino acid sequence set forth in SEQ ID NO:580, a CDR2 comprising the amino acid sequence set forth in SEQ ID NO:438, and a CDR3 comprising the amino acid sequence set forth in SEQ ID NO:581; and the heavy chain variable region comprises a CDR1 comprising the amino acid sequence set forth in SEQ ID NO:436, a CDR2 comprising the amino acid sequence set forth in SEQ ID NO:388, and a CDR3 comprising the amino acid sequence set forth in SEQ ID NO:579;
(cu) the light chain variable region comprises a CDR1 comprising the amino acid sequence set forth in SEQ ID NO:585, a CDR2 comprising the amino acid sequence set forth in SEQ ID NO:313, and a CDR3 comprising the amino acid sequence set forth in SEQ ID NO:314; and the heavy chain variable region comprises a CDR1 comprising the amino acid sequence set forth in SEQ ID NO:582, a CDR2 comprising the amino acid sequence set forth in SEQ ID NO:583, and a CDR3 comprising the amino acid sequence set forth in SEQ ID NO:584;
(cv) the light chain variable region comprises a CDR1 comprising the amino acid sequence set forth in SEQ ID NO:312, a CDR2 comprising the amino acid sequence set forth in SEQ ID NO:586, and a CDR3 comprising the amino acid sequence set forth in SEQ ID NO:314; and the heavy chain variable region comprises a CDR1 comprising the amino acid sequence set forth in SEQ ID NO:346, a CDR2 comprising the amino acid sequence set forth in SEQ ID NO:327, and a CDR3 comprising the amino acid sequence set forth in SEQ ID NO:578;
(cw) the light chain variable region comprises a CDR1 comprising the amino acid sequence set forth in SEQ ID NO:588, a CDR2 comprising the amino acid sequence set forth in SEQ ID NO:385, and a CDR3 comprising the amino acid sequence set forth in SEQ ID NO:375; and the heavy chain variable region comprises a CDR1 comprising the amino acid sequence set forth in SEQ ID NO:403, a CDR2 comprising the amino acid sequence set forth in SEQ ID NO:404, and a CDR3 comprising the amino acid sequence set forth in SEQ ID NO:587;
(cx) the light chain variable region comprises a CDR1 comprising the amino acid sequence set forth in SEQ ID NO:318, a CDR2 comprising the amino acid sequence set forth in SEQ ID NO:319, and a CDR3 comprising the amino acid sequence set forth in SEQ ID NO:592; and the heavy chain variable region comprises a CDR1 comprising the amino acid sequence set forth in SEQ ID NO:589, a CDR2 comprising the amino acid sequence set forth in SEQ ID NO:590, and a CDR3 comprising the amino acid sequence set forth in SEQ ID NO:591;
(cy) the light chain variable region comprises a CDR1 comprising the amino acid sequence set forth in SEQ ID NO:926, a CDR2 comprising the amino acid sequence set forth in SEQ ID NO:927, and a CDR3 comprising the amino acid sequence set forth in SEQ ID NO:928; and the heavy chain variable region comprises a CDR1 comprising the amino acid sequence set forth in SEQ ID NO:923, a CDR2 comprising the amino acid sequence set forth in SEQ ID NO:924, and a CDR3 comprising the amino acid sequence set forth in SEQ ID NO:925; or
(cz) the light chain variable region comprises a CDR1 comprising the amino acid sequence set forth in SEQ ID NO:932, a CDR2 comprising the amino acid sequence set forth in SEQ ID NO:933, and a CDR3 comprising the amino acid sequence set forth in SEQ ID NO:934; and the heavy chain variable region comprises a CDR1 comprising the amino acid sequence set forth in SEQ ID NO:929, a CDR2 comprising the amino acid sequence set forth in SEQ ID NO:930, and a CDR3 comprising the amino acid sequence set forth in SEQ ID NO:931.

3. The CAR of claim 1, wherein:
(ab) the light chain variable region comprises an amino acid sequence that has at least about 90% sequence identity to the sequence set forth in SEQ ID NO:7, and the heavy chain variable region comprises an amino acid sequence that has at least about 90% sequence identity to the sequence set forth in SEQ ID NO:8;
(ac) the light chain variable region comprises an amino acid sequence that has at least about 90% sequence identity to the sequence set forth in SEQ ID NO:11, and the heavy chain variable region comprises an amino acid sequence that has at least about 90% sequence identity to the sequence set forth in SEQ ID NO:12;
(ad) the light chain variable region comprises an amino acid sequence that has at least about 90% sequence identity to the sequence set forth in SEQ ID NO:299, and the heavy chain variable region comprises an amino acid sequence that has at least about 90% sequence identity to the sequence set forth in SEQ ID NO:300;
(ae) the light chain variable region comprises an amino acid sequence that has at least about 90% sequence identity to the sequence set forth in SEQ ID NO:15, and the heavy chain variable region comprises an amino acid sequence that has at least about 90% sequence identity to the sequence set forth in SEQ ID NO:16;
(af) the light chain variable region comprises an amino acid sequence that has at least about 90% sequence identity to the sequence set forth in SEQ ID NO:19, and the heavy chain variable region comprises an amino acid sequence that has at least about 90% sequence identity to the sequence set forth in SEQ ID NO:20;
(ag) the light chain variable region comprises an amino acid sequence that has at least about 90% sequence identity to the sequence set forth in SEQ ID NO:23, and the heavy chain variable region comprises an amino acid sequence that has at least about 90% sequence identity to the sequence set forth in SEQ ID NO:24;
(ah) the light chain variable region comprises an amino acid sequence that has at least about 90% sequence identity to the sequence set forth in SEQ ID NO:27, and the heavy chain variable region comprises an amino acid sequence that has at least about 90% sequence identity to the sequence set forth in SEQ ID NO:28;
(ai) the light chain variable region comprises an amino acid sequence that has at least about 90% sequence identity to the sequence set forth in SEQ ID NO:31, and the heavy chain variable region comprises an amino acid sequence that has at least about 90% sequence identity to the sequence set forth in SEQ ID NO:32;
(aj) the light chain variable region comprises an amino acid sequence that has at least about 90% sequence identity to the sequence set forth in SEQ ID NO:35, and the heavy chain variable region comprises an amino acid sequence that has at least about 90% sequence identity to the sequence set forth in SEQ ID NO:36;
(ak) the light chain variable region comprises an amino acid sequence that has at least about 90% sequence identity to the sequence set forth in SEQ ID NO:39, and the heavy chain variable region comprises an amino acid sequence that has at least about 90% sequence identity to the sequence set forth in SEQ ID NO:40;
(al) the light chain variable region comprises an amino acid sequence that has at least about 90% sequence identity to the sequence set forth in SEQ ID NO:43, and the heavy chain variable region comprises an amino acid sequence that has at least about 90% sequence identity to the sequence set forth in SEQ ID NO:44;
(am) the light chain variable region comprises an amino acid sequence that has at least about 90% sequence identity to the sequence set forth in SEQ ID NO:47, and the heavy chain variable region comprises an amino acid sequence that has at least about 90% sequence identity to the sequence set forth in SEQ ID NO:48;
(an) the light chain variable region comprises an amino acid sequence that has at least about 90% sequence identity to the sequence set forth in SEQ ID NO:51, and the heavy chain variable region comprises an amino acid sequence that has at least about 90% sequence identity to the sequence set forth in SEQ ID NO:52;
(ao) the light chain variable region comprises an amino acid sequence that has at least about 90% sequence identity to the sequence set forth in SEQ ID NO:55, and the heavy chain variable region comprises an amino acid sequence that has at least about 90% sequence identity to the sequence set forth in SEQ ID NO:56;
(ap) the light chain variable region comprises an amino acid sequence that has at least about 90% sequence identity to the sequence set forth in SEQ ID NO:59, and the heavy chain variable region comprises an amino acid sequence that has at least about 90% sequence identity to the sequence set forth in SEQ ID NO:60;
(aq) the light chain variable region comprises an amino acid sequence that has at least about 90% sequence identity to the sequence set forth in SEQ ID NO:63, and the heavy chain variable region comprises an amino acid sequence that has at least about 90% sequence identity to the sequence set forth in SEQ ID NO:64;
(ar) the light chain variable region comprises an amino acid sequence that has at least about 90% sequence identity to the sequence set forth in SEQ ID NO:67, and the heavy chain variable region comprises an amino acid sequence that has at least about 90% sequence identity to the sequence set forth in SEQ ID NO:68;
(as) the light chain variable region comprises an amino acid sequence that has at least about 90% sequence identity to the sequence set forth in SEQ ID NO:71, and the heavy chain variable region comprises an amino acid sequence that has at least about 90% sequence identity to the sequence set forth in SEQ ID NO:72;
(at) the light chain variable region comprises an amino acid sequence that has at least about 90% sequence identity to the sequence set forth in SEQ ID NO:75, and the heavy chain variable region comprises an amino acid sequence that has at least about 90% sequence identity to the sequence set forth in SEQ ID NO:76;
(au) the light chain variable region comprises an amino acid sequence that has at least about 90% sequence identity to the sequence set forth in SEQ ID NO:79, and the heavy chain variable region comprises an amino acid sequence that has at least about 90% sequence identity to the sequence set forth in SEQ ID NO:80;
(av) the light chain variable region comprises an amino acid sequence that has at least about 90% sequence identity to the sequence set forth in SEQ ID NO:83, and the heavy chain variable region comprises an amino acid sequence that has at least about 90% sequence identity to the sequence set forth in SEQ ID NO:84;
(aw) the light chain variable region comprises an amino acid sequence that has at least about 90% sequence identity to the sequence set forth in SEQ ID NO:87, and the heavy chain variable region comprises an amino acid sequence that has at least about 90% sequence identity to the sequence set forth in SEQ ID NO:88;
(ax) the light chain variable region comprises an amino acid sequence that has at least about 90% sequence identity to the sequence set forth in SEQ ID NO:91, and the heavy chain variable region comprises an amino acid sequence that has at least about 90% sequence identity to the sequence set forth in SEQ ID NO:92;
(ay) the light chain variable region comprises an amino acid sequence that has at least about 90% sequence identity to the sequence set forth in SEQ ID NO:95, and the heavy chain variable region comprises an amino acid sequence that has at least about 90% sequence identity to the sequence set forth in SEQ ID NO:96;
(az) the light chain variable region comprises an amino acid sequence that has at least about 90% sequence identity to the sequence set forth in SEQ ID NO:99, and the heavy chain variable region comprises an amino acid sequence that has at least about 90% sequence identity to the sequence set forth in SEQ ID NO:100;
(ba) the light chain variable region comprises an amino acid sequence that has at least about 90% sequence identity to the sequence set forth in SEQ ID NO:103, and the heavy chain variable region comprises an amino acid sequence that has at least about 90% sequence identity to the sequence set forth in SEQ ID NO:104;
(bb) the light chain variable region comprises an amino acid sequence that has at least about 90% sequence identity to the sequence set forth in SEQ ID NO:107, and the heavy chain variable region comprises an amino acid sequence that has at least about 90% sequence identity to the sequence set forth in SEQ ID NO:108;
(be) the light chain variable region comprises an amino acid sequence that has at least about 90% sequence identity to the sequence set forth in SEQ ID NO:111, and the heavy chain variable region comprises an amino acid sequence that has at least about 90% sequence identity to the sequence set forth in SEQ ID NO:112;
(be) the light chain variable region comprises an amino acid sequence that has at least about 90% sequence identity to the sequence set forth in SEQ ID NO:119, and the heavy chain variable region comprises an amino acid sequence that has at least about 90% sequence identity to the sequence set forth in SEQ ID NO:120;
(bf) the light chain variable region comprises an amino acid sequence that has at least about 90% sequence identity to the sequence set forth in SEQ ID NO:123, and the heavy chain variable region comprises an amino acid sequence that has at least about 90% sequence identity to the sequence set forth in SEQ ID NO:124;
(bg) the light chain variable region comprises an amino acid sequence that has at least about 90% sequence identity to the sequence set forth in SEQ ID NO:127, and the heavy chain variable region comprises an amino acid sequence that has at least about 90% sequence identity to the sequence set forth in SEQ ID NO:128;
(bh) the light chain variable region comprises an amino acid sequence that has at least about 90% sequence identity to the sequence set forth in SEQ ID NO:131, and the heavy chain variable region comprises an amino acid sequence that has at least about 90% sequence identity to the sequence set forth in SEQ ID NO:132;
(bi) the light chain variable region comprises an amino acid sequence that has at least about 90% sequence identity to the sequence set forth in SEQ ID NO:135, and the heavy chain variable region comprises an amino acid sequence that has at least about 90% sequence identity to the sequence set forth in SEQ ID NO:136;
(bj) the light chain variable region comprises an amino acid sequence that has at least about 90% sequence identity to the sequence set forth in SEQ ID NO:139, and the heavy chain variable region comprises an amino acid sequence that has at least about 90% sequence identity to the sequence set forth in SEQ ID NO:140;
(bl) the light chain variable region comprises an amino acid sequence that has at least about 90% sequence identity to the sequence set forth in SEQ ID NO:147, and the heavy chain variable region comprises an amino acid sequence that has at least about 90% sequence identity to the sequence set forth in SEQ ID NO:148;
(bm) the light chain variable region comprises an amino acid sequence that has at least about 90% sequence identity to the sequence set forth in SEQ ID NO:151, and the heavy chain variable region comprises an amino acid sequence that has at least about 90% sequence identity to the sequence set forth in SEQ ID NO:152;
(bn) the light chain variable region comprises an amino acid sequence that has at least about 90% sequence identity to the sequence set forth in SEQ ID NO:155, and the heavy chain variable region comprises an amino acid sequence that has at least about 90% sequence identity to the sequence set forth in SEQ ID NO:156;
(bo) the light chain variable region comprises an amino acid sequence that has at least about 90% sequence identity to the sequence set forth in SEQ ID NO:159, and the heavy chain variable region comprises an amino acid sequence that has at least about 90% sequence identity to the sequence set forth in SEQ ID NO:160;
(bp) the light chain variable region comprises an amino acid sequence that has at least about 90% sequence identity to the sequence set forth in SEQ ID NO:163, and the heavy chain variable region comprises an amino acid sequence that has at least about 90% sequence identity to the sequence set forth in SEQ ID NO:164;
(bq) the light chain variable region comprises an amino acid sequence that has at least about 90% sequence identity to the sequence set forth in SEQ ID NO:167, and the heavy chain variable region comprises an amino acid sequence that has at least about 90% sequence identity to the sequence set forth in SEQ ID NO:168;
(bs) the light chain variable region comprises an amino acid sequence that has at least about 90% sequence identity to the sequence set forth in SEQ ID NO:175, and the heavy chain variable region comprises an amino acid sequence that has at least about 90% sequence identity to the sequence set forth in SEQ ID NO:176;
(bt) the light chain variable region comprises an amino acid sequence that has at least about 90% sequence identity to the sequence set forth in SEQ ID NO:179, and the heavy chain variable region comprises an amino acid sequence that has at least about 90% sequence identity to the sequence set forth in SEQ ID NO:180;
(bu) the light chain variable region comprises an amino acid sequence that has at least about 90% sequence identity to the sequence set forth in SEQ ID NO:183, and the heavy chain variable region comprises an amino acid sequence that has at least about 90% sequence identity to the sequence set forth in SEQ ID NO:184;
(by) the light chain variable region comprises an amino acid sequence that has at least about 90% sequence identity to the sequence set forth in SEQ ID NO:187, and the heavy chain variable region comprises an amino acid sequence that has at least about 90% sequence identity to the sequence set forth in SEQ ID NO:188;
(bw) the light chain variable region comprises an amino acid sequence that has at least about 90% sequence identity to the sequence set forth in SEQ ID NO:191, and the heavy chain variable region comprises an amino acid sequence that has at least about 90% sequence identity to the sequence set forth in SEQ ID NO:192;
(bx) the light chain variable region comprises an amino acid sequence that has at least about 90% sequence identity to the sequence set forth in SEQ ID NO:195, and the heavy chain variable region comprises an amino acid sequence that has at least about 90% sequence identity to the sequence set forth in SEQ ID NO:196;
(by) the light chain variable region comprises an amino acid sequence that has at least about 90% sequence identity to the sequence set forth in SEQ ID NO:199, and the heavy chain variable region comprises an amino acid sequence that has at least about 90% sequence identity to the sequence set forth in SEQ ID NO:200;
(bz) the light chain variable region comprises an amino acid sequence that has at least about 90% sequence identity to the sequence set forth in SEQ ID NO:203, and the heavy chain variable region comprises an amino acid sequence that has at least about 90% sequence identity to the sequence set forth in SEQ ID NO:204;
(ca) the light chain variable region comprises an amino acid sequence that has at least about 90% sequence identity to the sequence set forth in SEQ ID NO:207, and the heavy chain variable region comprises an amino acid sequence that has at least about 90% sequence identity to the sequence set forth in SEQ ID NO:208;
(cb) the light chain variable region comprises an amino acid sequence that has at least about 90% sequence identity to the sequence set forth in SEQ ID NO:211, and the heavy chain variable region comprises an amino acid sequence that has at least about 90% sequence identity to the sequence set forth in SEQ ID NO:212;
(ce) the light chain variable region comprises an amino acid sequence that has at least about 90% sequence identity to the sequence set forth in SEQ ID NO:223, and the heavy chain variable region comprises an amino acid sequence that has at least about 90% sequence identity to the sequence set forth in SEQ ID NO:224;
(cf) the light chain variable region comprises an amino acid sequence that has at least about 90% sequence identity to the sequence set forth in SEQ ID NO:227, and the heavy chain variable region comprises an amino acid sequence that has at least about 90% sequence identity to the sequence set forth in SEQ ID NO:228;
(cg) the light chain variable region comprises an amino acid sequence that has at least about 90% sequence identity to the sequence set forth in SEQ ID NO:231, and the heavy chain variable region comprises an amino acid sequence that has at least about 90% sequence identity to the sequence set forth in SEQ ID NO:232;
(ci) the light chain variable region comprises an amino acid sequence that has at least about 90% sequence identity to the sequence set forth in SEQ ID NO:239, and the heavy chain variable region comprises an amino acid sequence that has at least about 90% sequence identity to the sequence set forth in SEQ ID NO:240;
(cj) the light chain variable region comprises an amino acid sequence that has at least about 90% sequence identity to the sequence set forth in SEQ ID NO:243, and the heavy chain variable region comprises an amino acid sequence that has at least about 90% sequence identity to the sequence set forth in SEQ ID NO:244;
(ck) the light chain variable region comprises an amino acid sequence that has at least about 90% sequence identity to the sequence set forth in SEQ ID NO:247, and the heavy chain variable region comprises an amino acid sequence that has at least about 90% sequence identity to the sequence set forth in SEQ ID NO:248;
(cl) the light chain variable region comprises an amino acid sequence that has at least about 90% sequence identity to the sequence set forth in SEQ ID NO:251, and the heavy chain variable region comprises an amino acid sequence that has at least about 90% sequence identity to the sequence set forth in SEQ ID NO:252;
(cm) the light chain variable region comprises an amino acid sequence that has at least about 90% sequence identity to the sequence set forth in SEQ ID NO:255, and the heavy chain variable region comprises an amino acid sequence that has at least about 90% sequence identity to the sequence set forth in SEQ ID NO:256;
(cn) the light chain variable region comprises an amino acid sequence that has at least about 90% sequence identity to the sequence set forth in SEQ ID NO:259, and the heavy chain variable region comprises an amino acid sequence that has at least about 90% sequence identity to the sequence set forth in SEQ ID NO:260;
(co) the light chain variable region comprises an amino acid sequence that has at least about 90% sequence identity to the sequence set forth in SEQ ID NO:263, and the heavy chain variable region comprises an amino acid sequence that has at least about 90% sequence identity to the sequence set forth in SEQ ID NO:264;
(cq) the light chain variable region comprises an amino acid sequence that has at least about 90% sequence identity to the sequence set forth in SEQ ID NO:271, and the heavy chain variable region comprises an amino acid sequence that has at least about 90% sequence identity to the sequence set forth in SEQ ID NO:272;
(cr) the light chain variable region comprises an amino acid sequence that has at least about 90% sequence identity to the sequence set forth in SEQ ID NO:275, and the heavy chain variable region comprises an amino acid sequence that has at least about 90% sequence identity to the sequence set forth in SEQ ID NO:276;
(cs) the light chain variable region comprises an amino acid sequence that has at least about 90% sequence identity to the sequence set forth in SEQ ID NO:279, and the heavy chain variable region comprises an amino acid sequence that has at least about 90% sequence identity to the sequence set forth in SEQ ID NO:280;
(ct) the light chain variable region comprises an amino acid sequence that has at least about 90% sequence identity to the sequence set forth in SEQ ID NO:283, and the heavy chain variable region comprises an amino acid sequence that has at least about 90% sequence identity to the sequence set forth in SEQ ID NO:284;
(cu) the light chain variable region comprises an amino acid sequence that has at least about 90% sequence identity to the sequence set forth in SEQ ID NO:287, and the heavy chain variable region comprises an amino acid sequence that has at least about 90% sequence identity to the sequence set forth in SEQ ID NO:288;
(cv) the light chain variable region comprises an amino acid sequence that has at least about 90% sequence identity to the sequence set forth in SEQ ID NO:291, and the heavy chain variable region comprises an amino acid sequence that has at least about 90% sequence identity to the sequence set forth in SEQ ID NO:292;
(cw) the light chain variable region comprises an amino acid sequence that has at least about 90% sequence identity to the sequence set forth in SEQ ID NO:303, and the heavy chain variable region comprises an amino acid sequence that has at least about 90% sequence identity to the sequence set forth in SEQ ID NO:304;
(cx) the light chain variable region comprises an amino acid sequence that has at least about 90% sequence identity to the sequence set forth in SEQ ID NO:295, and the heavy chain variable region comprises an amino acid sequence that has at least about 90% sequence identity to the sequence set forth in SEQ ID NO:296;
(cy) the light chain variable region comprises an amino acid sequence that has at least about 90% sequence identity to the sequence set forth in SEQ ID NO:915, and the heavy chain variable region comprises an amino acid sequence that has at least about 90% sequence identity to the sequence set forth in SEQ ID NO:917; or
(cz) the light chain variable region comprises an amino acid sequence that has at least about 90% sequence identity to the sequence set forth in SEQ ID NO:919, and the heavy chain variable region comprises an amino acid sequence that has at least about 90% sequence identity to the sequence set forth in SEQ ID NO:921.

4. The CAR of claim 3, wherein:
(ab) the light chain variable region comprises the amino acid sequence set forth in SEQ ID NO:7, and the heavy chain variable region comprises the amino acid sequence set forth in SEQ ID NO:8;
(ac) the light chain variable region comprises the amino acid sequence set forth in SEQ ID NO:11, and the heavy chain variable region comprises the amino acid sequence set forth in SEQ ID NO:12;
(ad) the light chain variable region comprises the amino acid sequence set forth in SEQ ID NO:299, and the heavy chain variable region comprises the amino acid sequence set forth in SEQ ID NO:300;
(ae) the light chain variable region comprises the amino acid sequence set forth in SEQ ID NO:15, and the heavy chain variable region comprises the amino acid sequence set forth in SEQ ID NO:16;
(af) the light chain variable region comprises the amino acid sequence set forth in SEQ ID NO:19, and the heavy chain variable region comprises the amino acid sequence set forth in SEQ ID NO:20;
(ag) the light chain variable region comprises the amino acid sequence set forth in SEQ ID NO:23, and the heavy chain variable region comprises the amino acid sequence set forth in SEQ ID NO:24;
(ah) the light chain variable region comprises the amino acid sequence set forth in SEQ ID NO:27, and the heavy chain variable region comprises the amino acid sequence set forth in SEQ ID NO:28;
(ai) the light chain variable region comprises the amino acid sequence set forth in SEQ ID NO:31, and the heavy chain variable region comprises the amino acid sequence set forth in SEQ ID NO:32;
(aj) the light chain variable region comprises the amino acid sequence set forth in SEQ ID NO:35, and the heavy chain variable region comprises the amino acid sequence set forth in SEQ ID NO:36;
(ak) the light chain variable region comprises the amino acid sequence set forth in SEQ ID NO:39, and the heavy chain variable region comprises the amino acid sequence set forth in SEQ ID NO:40;
(al) the light chain variable region comprises the amino acid sequence set forth in SEQ ID NO:43, and the heavy chain variable region comprises the amino acid sequence set forth in SEQ ID NO:44;
(am) the light chain variable region comprises the amino acid sequence set forth in SEQ ID NO:47, and the heavy chain variable region comprises the amino acid sequence set forth in SEQ ID NO:48;
(an) the light chain variable region comprises the amino acid sequence set forth in SEQ ID NO:51, and the heavy chain variable region comprises the amino acid sequence set forth in SEQ ID NO:52;
(ao) the light chain variable region comprises the amino acid sequence set forth in SEQ ID NO:55, and the heavy chain variable region comprises the amino acid sequence set forth in SEQ ID NO:56;
(ap) the light chain variable region comprises the amino acid sequence set forth in SEQ ID NO:59, and the heavy chain variable region comprises the amino acid sequence set forth in SEQ ID NO:60;
(aq) the light chain variable region comprises the amino acid sequence set forth in SEQ ID NO:63, and the heavy chain variable region comprises the amino acid sequence set forth in SEQ ID NO:64;
(ar) the light chain variable region comprises the amino acid sequence set forth in SEQ ID NO:67, and the heavy chain variable region comprises the amino acid sequence set forth in SEQ ID NO:68;
(as) the light chain variable region comprises the amino acid sequence set forth in SEQ ID NO:71, and the heavy chain variable region comprises the amino acid sequence set forth in SEQ ID NO:72;
(at) the light chain variable region comprises the amino acid sequence set forth in SEQ ID NO:75, and the heavy chain variable region comprises the amino acid sequence set forth in SEQ ID NO:76;
(au) the light chain variable region comprises the amino acid sequence set forth in SEQ ID NO:79, and the heavy chain variable region comprises the amino acid sequence set forth in SEQ ID NO:80;
(av) the light chain variable region comprises the amino acid sequence set forth in SEQ ID NO:83, and the heavy chain variable region comprises the amino acid sequence set forth in SEQ ID NO:84;
(aw) the light chain variable region comprises the amino acid sequence set forth in SEQ ID NO:87, and the heavy chain variable region comprises the amino acid sequence set forth in SEQ ID NO:88;
(ax) the light chain variable region comprises the amino acid sequence set forth in SEQ ID NO:91, and the heavy chain variable region comprises the amino acid sequence set forth in SEQ ID NO:92;
(ay) the light chain variable region comprises the amino acid sequence set forth in SEQ ID NO:95, and the heavy chain variable region comprises the amino acid sequence set forth in SEQ ID NO:96;
(az) the light chain variable region comprises the amino acid sequence set forth in SEQ ID NO:99, and the heavy chain variable region comprises the amino acid sequence set forth in SEQ ID NO:100;
(ba) the light chain variable region comprises the amino acid sequence set forth in SEQ ID NO:103, and the heavy chain variable region comprises the amino acid sequence set forth in SEQ ID NO:104;
(bb) the light chain variable region comprises the amino acid sequence set forth in SEQ ID NO:107, and the heavy chain variable region comprises the amino acid sequence set forth in SEQ ID NO:108;
(bc) the light chain variable region comprises the amino acid sequence set forth in SEQ ID NO:111, and the heavy chain variable region comprises the amino acid sequence set forth in SEQ ID NO:112;
(be) the light chain variable region comprises the amino acid sequence set forth in SEQ ID NO:119, and the heavy chain variable region comprises the amino acid sequence set forth in SEQ ID NO:120;
(bf) the light chain variable region comprises the amino acid sequence set forth in SEQ ID NO:123, and the heavy chain variable region comprises the amino acid sequence set forth in SEQ ID NO:124;
(bg) the light chain variable region comprises the amino acid sequence set forth in SEQ ID NO:127, and the heavy chain variable region comprises the amino acid sequence set forth in SEQ ID NO:128;
(bh) the light chain variable region comprises the amino acid sequence set forth in SEQ ID NO:131, and the heavy chain variable region comprises the amino acid sequence set forth in SEQ ID NO:132;
(bi) the light chain variable region comprises the amino acid sequence set forth in SEQ ID NO:135, and the heavy chain variable region comprises the amino acid sequence set forth in SEQ ID NO:136;
(bj) the light chain variable region comprises the amino acid sequence set forth in SEQ ID NO:139, and the heavy chain variable region comprises the amino acid sequence set forth in SEQ ID NO:140;
(bl) the light chain variable region comprises the amino acid sequence set forth in SEQ ID NO:147, and the heavy chain variable region comprises the amino acid sequence set forth in SEQ ID NO:148;
(bm) the light chain variable region comprises the amino acid sequence set forth in SEQ ID NO:151, and the heavy chain variable region comprises the amino acid sequence set forth in SEQ ID NO:152;
(bn) the light chain variable region comprises the amino acid sequence set forth in SEQ ID NO:155, and the heavy chain variable region comprises the amino acid sequence set forth in SEQ ID NO:156;
(bo) the light chain variable region comprises the amino acid sequence set forth in SEQ ID NO:159, and the heavy chain variable region comprises the amino acid sequence set forth in SEQ ID NO:160;
(bp) the light chain variable region comprises the amino acid sequence set forth in SEQ ID NO:163, and the heavy chain variable region comprises the amino acid sequence set forth in SEQ ID NO:164;
(bq) the light chain variable region comprises the amino acid sequence set forth in SEQ ID NO:167, and the heavy chain variable region comprises the amino acid sequence set forth in SEQ ID NO:168;
(bs) the light chain variable region comprises the amino acid sequence set forth in SEQ ID NO:175, and the heavy chain variable region comprises the amino acid sequence set forth in SEQ ID NO:176;
(bt) the light chain variable region comprises the amino acid sequence set forth in SEQ ID NO:179, and the heavy chain variable region comprises the amino acid sequence set forth in SEQ ID NO:180;
(bu) the light chain variable region comprises the amino acid sequence set forth in SEQ ID NO:183, and the heavy chain variable region comprises the amino acid sequence set forth in SEQ ID NO:184;
(by) the light chain variable region comprises the amino acid sequence set forth in SEQ ID NO:187, and the heavy chain variable region comprises the amino acid sequence set forth in SEQ ID NO:188;
(bw) the light chain variable region comprises the amino acid sequence set forth in SEQ ID NO:191, and the heavy chain variable region comprises the amino acid sequence set forth in SEQ ID NO:192;
(bx) the light chain variable region comprises the amino acid sequence set forth in SEQ ID NO:195, and the heavy chain variable region comprises the amino acid sequence set forth in SEQ ID NO:196;
(by) the light chain variable region comprises the amino acid sequence set forth in SEQ ID NO:199, and the heavy chain variable region comprises the amino acid sequence set forth in SEQ ID NO:200;
(bz) the light chain variable region comprises the amino acid sequence set forth in SEQ ID NO:203, and the heavy chain variable region comprises the amino acid sequence set forth in SEQ ID NO:204;
(ca) the light chain variable region comprises the amino acid sequence set forth in SEQ ID NO:207, and the heavy chain variable region comprises the amino acid sequence set forth in SEQ ID NO:208;
(cb) the light chain variable region comprises the amino acid sequence set forth in SEQ ID NO:211, and the heavy chain variable region comprises the amino acid sequence set forth in SEQ ID NO:212;
(ce) the light chain variable region comprises the amino acid sequence set forth in SEQ ID NO:223, and the heavy chain variable region comprises the amino acid sequence set forth in SEQ ID NO:224;
(cf) the light chain variable region comprises the amino acid sequence set forth in SEQ ID NO:227, and the heavy chain variable region comprises the amino acid sequence set forth in SEQ ID NO:228;
(cg) the light chain variable region comprises the amino acid sequence set forth in SEQ ID NO:231, and the heavy chain variable region comprises the amino acid sequence set forth in SEQ ID NO:232;
(ci) the light chain variable region comprises the amino acid sequence set forth in SEQ ID NO:239, and the heavy chain variable region comprises the amino acid sequence set forth in SEQ ID NO:240;
(cj) the light chain variable region comprises the amino acid sequence set forth in SEQ ID NO:243, and the heavy chain variable region comprises the amino acid sequence set forth in SEQ ID NO:244;
(ck) the light chain variable region comprises the amino acid sequence set forth in SEQ ID NO:247, and the heavy chain variable region comprises the amino acid sequence set forth in SEQ ID NO:248;
(cl) the light chain variable region comprises the amino acid sequence set forth in SEQ ID NO:251, and the heavy chain variable region comprises the amino acid sequence set forth in SEQ ID NO:252;
(cm) the light chain variable region comprises the amino acid sequence set forth in SEQ ID NO:255, and the heavy chain variable region comprises the amino acid sequence set forth in SEQ ID NO:256;
(cn) the light chain variable region comprises the amino acid sequence set forth in SEQ ID NO:259, and the heavy chain variable region comprises the amino acid sequence set forth in SEQ ID NO:260;
(co) the light chain variable region comprises the amino acid sequence set forth in SEQ ID NO:263, and the heavy chain variable region comprises the amino acid sequence set forth in SEQ ID NO:264;
(cq) the light chain variable region comprises the amino acid sequence set forth in SEQ ID NO:271, and the heavy chain variable region comprises the amino acid sequence set forth in SEQ ID NO:272;
(cr) the light chain variable region comprises the amino acid sequence set forth in SEQ ID NO:275, and the heavy chain variable region comprises the amino acid sequence set forth in SEQ ID NO:276;
(cs) the light chain variable region comprises the amino acid sequence set forth in SEQ ID NO:279, and the heavy chain variable region comprises the amino acid sequence set forth in SEQ ID NO:280;
(ct) the light chain variable region comprises the amino acid sequence set forth in SEQ ID NO:283, and the heavy chain variable region comprises the amino acid sequence set forth in SEQ ID NO:284;
(cu) the light chain variable region comprises the amino acid sequence set forth in SEQ ID NO:287, and the heavy chain variable region comprises the amino acid sequence set forth in SEQ ID NO:288;
(cv) the light chain variable region comprises the amino acid sequence set forth in SEQ ID NO:291, and the heavy chain variable region comprises the amino acid sequence set forth in SEQ ID NO:292;
(cw) the light chain variable region comprises the amino acid sequence set forth in SEQ ID NO:303, and the heavy chain variable region comprises the amino acid sequence set forth in SEQ ID NO:304;
(cx) the light chain variable region comprises the amino acid sequence set forth in SEQ ID NO:295, and the heavy chain variable region comprises the amino acid sequence set forth in SEQ ID NO:296;
(cy) the light chain variable region comprises the amino acid sequence set forth in SEQ ID NO:917, and the heavy chain variable region comprises the amino acid sequence set forth in SEQ ID NO:915; or
(cz) the light chain variable region comprises the amino acid sequence set forth in SEQ ID NO:921, and the heavy chain variable region comprises the amino acid sequence set forth in SEQ ID NO:919.

5. The CAR of claim 1, wherein the extracellular antigen-binding domain comprises a single-chain variable fragment (scFv), or a human scFv.

6. The CAR of claim 1, wherein the: a) transmembrane domain comprises a CD8 polypeptide, a CD28 polypeptide, a CD3ζ polypeptide, a CD4 polypeptide, a 4-1BB polypeptide, an OX40 polypeptide, an ICOS polypeptide, a CTLA-4 polypeptide, a PD-1 polypeptide, a LAG-3 polypeptide, a 2B4 polypeptide, a BTLA polypeptide, a synthetic peptide, or a combination thereof; b) the intracellular domain comprises a CD3ζ polypeptide; and/or c) the intracellular domain further comprises at least one signaling region.

7. The CAR of claim 6, wherein the at least one signaling region comprises a CD28 polypeptide, a 4-1BB polypeptide, an OX40 polypeptide, an ICOS polypeptide, a PD-1 polypeptide, a CTLA-4 polypeptide, a LAG-3 polypeptide, a 2B4 polypeptide, a BTLA polypeptide, a synthetic peptide, or a combination thereof, and/or the at least one signaling region comprises at least one co-stimulatory signaling region.

8. The CAR of claim 7, wherein the at least one co-stimulatory signaling region comprises a CD28 polypeptide, a 4-1BB polypeptide, an OX40 polypeptide, an ICOS polypeptide, a DAP-10 polypeptide, or a combination thereof.

9. The CAR of claim 1, wherein:
(a) the transmembrane domain comprises a CD28 polypeptide, and the intracellular domain comprises a CD3ζ polypeptide and a co-stimulatory signaling region that comprises a CD28 polypeptide;
(b) the transmembrane domain comprises a CD8 polypeptide, and the intracellular domain comprises a CD3ζ polypeptide and a co-stimulatory signaling region that comprises a 4-1BB polypeptide; or
(c) the transmembrane domain comprises a CD28 polypeptide, and the intracellular domain comprises a CD3ζ polypeptide and a co-stimulatory signaling region that comprises a 4-1BB polypeptide.

10. An immunoresponsive cell comprising the CAR of claim 1.

11. The immunoresponsive cell of claim 10, wherein the immunoresponsive cell is further transduced with a nucleic acid molecule encoding at least one co-stimulatory ligand such that the immunoresponsive cell expresses the at least one co-stimulatory ligand; or a nucleic acid molecule encoding at least one cytokine such that the immunoresponsive cell secretes the at least one cytokine.

12. The immunoresponsive cell of claim 10, wherein the immunoresponsive cell is selected from the group consisting of a T cell, a Natural Killer (NK) cell, a cytotoxic T lymphocyte (CTL), a regulatory T cell, a human embryonic stem cell, a lymphoid progenitor cell, a T cell-precursor cell, and a pluripotent stem cell from which lymphoid cells may be differentiated.

13. The immunoresponsive cell of claim 12, wherein the immunoresponsive cell is a T cell.

14. A nucleic acid molecule encoding the CAR of claim 1.

15. A vector comprising the nucleic acid molecule of claim 14.

16. A host cell expressing the nucleic acid molecule of claim 14.

17. A method for producing an immunoresponsive cell that binds to Fc Receptor-Like 5 (FcRL5), comprising introducing into an immunoresponsive cell a nucleic acid molecule that encodes the CAR of claim 1.

18. A pharmaceutical composition comprising an effective amount of the immunoresponsive cell of claim 10 and a pharmaceutically acceptable excipient.

19. A kit for treating a tumor, the kit comprising the immunoresponsive cell of claim 10 and written instructions for using the immunoresponsive cell for treating a subject having a tumor.

20. A method of reducing tumor burden in a subject, or increasing or lengthening survival of a subject having tumor, the method comprising administering an effective amount of an immunoresponsive cell comprising a chimeric antigen receptor (CAR) to the subject, wherein the CAR comprises an extracellular antigen-binding domain, a transmembrane domain, and an intracellular domain, wherein the extracellular antigen-binding domain specifically binds to Fc Receptor-Like 5 (FcRL5) and comprises:
(aa) a light chain variable region comprising a CDR1, a CDR2, and a CDR3 of the light chain variable region sequence set forth in SEQ ID NO:3, and a heavy chain variable region comprising a CDR1, a CDR2, and a CDR3 of the heavy chain variable region sequence set forth in SEQ ID NO:4;
(ab) a light chain variable region comprising a CDR1, a CDR2, and a CDR3 of the light chain variable region sequence set forth in SEQ ID NO:7, and a heavy chain variable region comprising a CDR1, a CDR2, and a CDR3 of the heavy chain variable region sequence set forth in SEQ ID NO:8;
(ac) a light chain variable region comprising a CDR1, a CDR2, and a CDR3 of the light chain variable region sequence set forth in SEQ ID NO:11, and a heavy chain variable region comprising a CDR1, a CDR2, and a CDR3 of the heavy chain variable region sequence set forth in SEQ ID NO:12;
(ad) a light chain variable region comprising a CDR1, a CDR2, and a CDR3 of the light chain variable region sequence set forth in SEQ ID NO:299, and a heavy chain variable region comprising a CDR1, a CDR2, and a CDR3 of the heavy chain variable region sequence set forth in SEQ ID NO:300;
(ae) a light chain variable region comprising a CDR1, a CDR2, and a CDR3 of the light chain variable region sequence set forth in SEQ ID NO:15, and a heavy chain variable region comprising a CDR1, a CDR2, and a CDR3 of the heavy chain variable region sequence set forth in SEQ ID NO:16;
(af) a light chain variable region comprising a CDR1, a CDR2, and a CDR3 of the light chain variable region sequence set forth in SEQ ID NO:19, and a heavy chain variable region comprising a CDR1, a CDR2, and a CDR3 of the heavy chain variable region sequence set forth in SEQ ID NO:20;
(ag) a light chain variable region comprising a CDR1, a CDR2, and a CDR3 of the light chain variable region sequence set forth in SEQ ID NO:23, and a heavy chain variable region comprising a CDR1, a CDR2, and a CDR3 of the heavy chain variable region sequence set forth in SEQ ID NO:24;
(ah) a light chain variable region comprising a CDR1, a CDR2, and a CDR3 of the light chain variable region sequence set forth in SEQ ID NO:27, and a heavy chain variable region comprising a CDR1, a CDR2, and a CDR3 of the heavy chain variable region sequence set forth in SEQ ID NO:28;
(ai) a light chain variable region comprising a CDR1, a CDR2, and a CDR3 of the light chain variable region sequence set forth in SEQ ID NO:31, and a heavy chain variable region comprising a CDR1, a CDR2, and a CDR3 of the heavy chain variable region sequence set forth in SEQ ID NO:32;
(aj) a light chain variable region comprising a CDR1, a CDR2, and a CDR3 of the light chain variable region sequence set forth in SEQ ID NO:35, and a heavy chain variable region comprising a CDR1, a CDR2, and a CDR3 of the heavy chain variable region sequence set forth in SEQ ID NO:36;
(ak) a light chain variable region comprising a CDR1, a CDR2, and a CDR3 of the light chain variable region sequence set forth in SEQ ID NO:39, and a heavy chain variable region comprising a CDR1, a CDR2, and a CDR3 of the heavy chain variable region sequence set forth in SEQ ID NO:40;
(al) a light chain variable region comprising a CDR1, a CDR2, and a CDR3 of the light chain variable region sequence set forth in SEQ ID NO:43, and a heavy chain variable region comprising a CDR1, a CDR2, and a CDR3 of the heavy chain variable region sequence set forth in SEQ ID NO:44;
(am) a light chain variable region comprising a CDR1, a CDR2, and a CDR3 of the light chain variable region sequence set forth in SEQ ID NO:47, and a heavy chain variable region comprising a CDR1, a CDR2, and a CDR3 of the heavy chain variable region sequence set forth in SEQ ID NO:48;
(an) a light chain variable region comprising a CDR1, a CDR2, and a CDR3 of the light chain variable region sequence set forth in SEQ ID NO:51, and a heavy chain variable region comprising a CDR1, a CDR2, and a CDR3 of the heavy chain variable region sequence set forth in SEQ ID NO:52;
(ao) a light chain variable region comprising a CDR1, a CDR2, and a CDR3 of the light chain variable region sequence set forth in SEQ ID NO:55, and a heavy chain variable region comprising a CDR1, a CDR2, and a CDR3 of the heavy chain variable region sequence set forth in SEQ ID NO:56;
(ap) a light chain variable region comprising a CDR1, a CDR2, and a CDR3 of the light chain variable region sequence set forth in SEQ ID NO:59, and a heavy chain variable region comprising a CDR1, a CDR2, and a CDR3 of the heavy chain variable region sequence set forth in SEQ ID NO:60;
(aq) a light chain variable region comprising a CDR1, a CDR2, and a CDR3 of the light chain variable region sequence set forth in SEQ ID NO:63, and a heavy chain variable region comprising a CDR1, a CDR2, and a CDR3 of the heavy chain variable region sequence set forth in SEQ ID NO:64;
(ar) a light chain variable region comprising a CDR1, a CDR2, and a CDR3 of the light chain variable region sequence set forth in SEQ ID NO:67, and a heavy chain variable region comprising a CDR1, a CDR2, and a CDR3 of the heavy chain variable region sequence set forth in SEQ ID NO:68;
(as) a light chain variable region comprising a CDR1, a CDR2, and a CDR3 of the light chain variable region sequence set forth in SEQ ID NO:71, and a heavy chain variable region comprising a CDR1, a CDR2, and a CDR3 of the heavy chain variable region sequence set forth in SEQ ID NO:72;
(at) a light chain variable region comprising a CDR1, a CDR2, and a CDR3 of the light chain variable region sequence set forth in SEQ ID NO:75, and a heavy chain variable region comprising a CDR1, a CDR2, and a CDR3 of the heavy chain variable region sequence set forth in SEQ ID NO:76;
(au) a light chain variable region comprising a CDR1, a CDR2, and a CDR3 of the light chain variable region sequence set forth in SEQ ID NO:79, and a heavy chain variable region comprising a CDR1, a CDR2, and a CDR3 of the heavy chain variable region sequence set forth in SEQ ID NO:80;
(av) a light chain variable region comprising a CDR1, a CDR2, and a CDR3 of the light chain variable region sequence set forth in SEQ ID NO:83, and a heavy chain variable region comprising a CDR1, a CDR2, and a CDR3 of the heavy chain variable region sequence set forth in SEQ ID NO:84;
(aw) a light chain variable region comprising a CDR1, a CDR2, and a CDR3 of the light chain variable region sequence set forth in SEQ ID NO:87, and a heavy chain variable region comprising a CDR1, a CDR2, and a CDR3 of the heavy chain variable region sequence set forth in SEQ ID NO:88;
(ax) a light chain variable region comprising a CDR1, a CDR2, and a CDR3 of the light chain variable region sequence set forth in SEQ ID NO:91, and a heavy chain variable region comprising a CDR1, a CDR2, and a CDR3 of the heavy chain variable region sequence set forth in SEQ ID NO:92;
(ay) a light chain variable region comprising a CDR1, a CDR2, and a CDR3 of the light chain variable region sequence set forth in SEQ ID NO:95, and a heavy chain variable region comprising a CDR1, a CDR2, and a CDR3 of the heavy chain variable region sequence set forth in SEQ ID NO:96;
(az) a light chain variable region comprising a CDR1, a CDR2, and a CDR3 of the light chain variable region sequence set forth in SEQ ID NO:99, and a heavy chain variable region comprising a CDR1, a CDR2, and a CDR3 of the heavy chain variable region sequence set forth in SEQ ID NO:100;
(ba) a light chain variable region comprising a CDR1, a CDR2, and a CDR3 of the light chain variable region sequence set forth in SEQ ID NO:103, and a heavy chain variable region comprising a CDR1, a CDR2, and a CDR3 of the heavy chain variable region sequence set forth in SEQ ID NO:104;
(bb) a light chain variable region comprising a CDR1, a CDR2, and a CDR3 of the light chain variable region sequence set forth in SEQ ID NO:107, and a heavy chain variable region comprising a CDR1, a CDR2, and a CDR3 of the heavy chain variable region sequence set forth in SEQ ID NO:108;
(bc) a light chain variable region comprising a CDR1, a CDR2, and a CDR3 of the light chain variable region sequence set forth in SEQ ID NO:111, and a heavy chain variable region comprising a CDR1, a CDR2, and a CDR3 of the heavy chain variable region sequence set forth in SEQ ID NO:112;
(bd) a light chain variable region comprising a CDR1, a CDR2, and a CDR3 of the light chain variable region sequence set forth in SEQ ID NO:115, and a heavy chain variable region comprising a CDR1, a CDR2, and a CDR3 of the heavy chain variable region sequence set forth in SEQ ID NO:116;
(be) a light chain variable region comprising a CDR1, a CDR2, and a CDR3 of the light chain variable region sequence set forth in SEQ ID NO:119, and a heavy chain variable region comprising a CDR1, a CDR2, and a CDR3 of the heavy chain variable region sequence set forth in SEQ ID NO:120;
(bf) a light chain variable region comprising a CDR1, a CDR2, and a CDR3 of the light chain variable region sequence set forth in SEQ ID NO:123, and a heavy chain variable region comprising a CDR1, a CDR2, and a CDR3 of the heavy chain variable region sequence set forth in SEQ ID NO:124;
(bg) a light chain variable region comprising a CDR1, a CDR2, and a CDR3 of the light chain variable region sequence set forth in SEQ ID NO:127, and a heavy chain variable region comprising a CDR1, a CDR2, and a CDR3 of the heavy chain variable region sequence set forth in SEQ ID NO:128;
(bh) a light chain variable region comprising a CDR1, a CDR2, and a CDR3 of the light chain variable region sequence set forth in SEQ ID NO:131, and a heavy chain variable region comprising a CDR1, a CDR2, and a CDR3 of the heavy chain variable region sequence set forth in SEQ ID NO:132;
(bi) a light chain variable region comprising a CDR1, a CDR2, and a CDR3 of the light chain variable region sequence set forth in SEQ ID NO:135, and a heavy chain variable region comprising a CDR1, a CDR2, and a CDR3 of the heavy chain variable region sequence set forth in SEQ ID NO:136;
(bj) a light chain variable region comprising a CDR1, a CDR2, and a CDR3 of the light chain variable region sequence set forth in SEQ ID NO:139, and a heavy chain variable region comprising a CDR1, a CDR2, and a CDR3 of the heavy chain variable region sequence set forth in SEQ ID NO:140;
(bk) a light chain variable region comprising a CDR1, a CDR2, and a CDR3 of the light chain variable region sequence set forth in SEQ ID NO:143, and a heavy chain variable region comprising a CDR1, a CDR2, and a CDR3 of the heavy chain variable region sequence set forth in SEQ ID NO:144;
(bl) a light chain variable region comprising a CDR1, a CDR2, and a CDR3 of the light chain variable region sequence set forth in SEQ ID NO:147, and a heavy chain variable region comprising a CDR1, a CDR2, and a CDR3 of the heavy chain variable region sequence set forth in SEQ ID NO:148;
(bm) a light chain variable region comprising a CDR1, a CDR2, and a CDR3 of the light chain variable region sequence set forth in SEQ ID NO:151, and a heavy chain variable region comprising a CDR1, a CDR2, and a CDR3 of the heavy chain variable region sequence set forth in SEQ ID NO:152;
(bn) a light chain variable region comprising a CDR1, a CDR2, and a CDR3 of the light chain variable region sequence set forth in SEQ ID NO:155, and a heavy chain variable region comprising a CDR1, a CDR2, and a CDR3 of the heavy chain variable region sequence set forth in SEQ ID NO:156;
(bo) a light chain variable region comprising a CDR1, a CDR2, and a CDR3 of the light chain variable region sequence set forth in SEQ ID NO:159, and a heavy chain variable region comprising a CDR1, a CDR2, and a CDR3 of the heavy chain variable region sequence set forth in SEQ ID NO:160;
(bp) a light chain variable region comprising a CDR1, a CDR2, and a CDR3 of the light chain variable region sequence set forth in SEQ ID NO:163, and a heavy chain variable region comprising a CDR1, a CDR2, and a CDR3 of the heavy chain variable region sequence set forth in SEQ ID NO:164;
(bq) a light chain variable region comprising a CDR1, a CDR2, and a CDR3 of the light chain variable region sequence set forth in SEQ ID NO:167, and a heavy chain variable region comprising a CDR1, a CDR2, and a CDR3 of the heavy chain variable region sequence set forth in SEQ ID NO:168;
(br) a light chain variable region comprising a CDR1, a CDR2, and a CDR3 of the light chain variable region sequence set forth in SEQ ID NO:171, and a heavy chain variable region comprising a CDR1, a CDR2, and a CDR3 of the heavy chain variable region sequence set forth in SEQ ID NO:172;
(bs) a light chain variable region comprising a CDR1, a CDR2, and a CDR3 of the light chain variable region sequence set forth in SEQ ID NO:175, and a heavy chain variable region comprising a CDR1, a CDR2, and a CDR3 of the heavy chain variable region sequence set forth in SEQ ID NO:176;
(bt) a light chain variable region comprising a CDR1, a CDR2, and a CDR3 of the light chain variable region sequence set forth in SEQ ID NO:179, and a heavy chain variable region comprising a CDR1, a CDR2, and a CDR3 of the heavy chain variable region sequence set forth in SEQ ID NO:180;
(bu) a light chain variable region comprising a CDR1, a CDR2, and a CDR3 of the light chain variable region sequence set forth in SEQ ID NO:183, and a heavy chain variable region comprising a CDR1, a CDR2, and a CDR3 of the heavy chain variable region sequence set forth in SEQ ID NO:184;
(by) a light chain variable region comprising a CDR1, a CDR2, and a CDR3 of the light chain variable region sequence set forth in SEQ ID NO:187, and a heavy chain variable region comprising a CDR1, a CDR2, and a CDR3 of the heavy chain variable region sequence set forth in SEQ ID NO:188;
(bw) a light chain variable region comprising a CDR1, a CDR2, and a CDR3 of the light chain variable region sequence set forth in SEQ ID NO:191, and a heavy chain variable region comprising a CDR1, a CDR2, and a CDR3 of the heavy chain variable region sequence set forth in SEQ ID NO:192;
(bx) a light chain variable region comprising a CDR1, a CDR2, and a CDR3 of the light chain variable region sequence set forth in SEQ ID NO:195, and a heavy chain variable region comprising a CDR1, a CDR2, and a CDR3 of the heavy chain variable region sequence set forth in SEQ ID NO:196;
(by) a light chain variable region comprising a CDR1, a CDR2, and a CDR3 of the light chain variable region sequence set forth in SEQ ID NO:199, and a heavy chain variable region comprising a CDR1, a CDR2, and a CDR3 of the heavy chain variable region sequence set forth in SEQ ID NO:200;
(bz) a light chain variable region comprising a CDR1, a CDR2, and a CDR3 of the light chain variable region sequence set forth in SEQ ID NO:203, and a heavy chain variable region comprising a CDR1, a CDR2, and a CDR3 of the heavy chain variable region sequence set forth in SEQ ID NO:204;
(ca) a light chain variable region comprising a CDR1, a CDR2, and a CDR3 of the light chain variable region sequence set forth in SEQ ID NO:207, and a heavy chain variable region comprising a CDR1, a CDR2, and a CDR3 of the heavy chain variable region sequence set forth in SEQ ID NO:208;
(cb) a light chain variable region comprising a CDR1, a CDR2, and a CDR3 of the light chain variable region sequence set forth in SEQ ID NO:211, and a heavy chain variable region comprising a CDR1, a CDR2, and a CDR3 of the heavy chain variable region sequence set forth in SEQ ID NO:212;
(cc) a light chain variable region comprising a CDR1, a CDR2, and a CDR3 of the light chain variable region sequence set forth in SEQ ID NO:215, and a heavy chain variable region comprising a CDR1, a CDR2, and a CDR3 of the heavy chain variable region sequence set forth in SEQ ID NO:216;
(cd) a light chain variable region comprising a CDR1, a CDR2, and a CDR3 of the light chain variable region sequence set forth in SEQ ID NO:219, and a heavy chain variable region comprising a CDR1, a CDR2, and a CDR3 of the heavy chain variable region sequence set forth in SEQ ID NO:220;
(ce) a light chain variable region comprising a CDR1, a CDR2, and a CDR3 of the light chain variable region sequence set forth in SEQ ID NO:223, and a heavy chain variable region comprising a CDR1, a CDR2, and a CDR3 of the heavy chain variable region sequence set forth in SEQ ID NO:224;
(cf) a light chain variable region comprising a CDR1, a CDR2, and a CDR3 of the light chain variable region sequence set forth in SEQ ID NO:227, and a heavy chain variable region comprising a CDR1, a CDR2, and a CDR3 of the heavy chain variable region sequence set forth in SEQ ID NO:228;
(cg) a light chain variable region comprising a CDR1, a CDR2, and a CDR3 of the light chain variable region sequence set forth in SEQ ID NO:231, and a heavy chain variable region comprising a CDR1, a CDR2, and a CDR3 of the heavy chain variable region sequence set forth in SEQ ID NO:232;
(ch) a light chain variable region comprising a CDR1, a CDR2, and a CDR3 of the light chain variable region sequence set forth in SEQ ID NO:235, and a heavy chain variable region comprising a CDR1, a CDR2, and a CDR3 of the heavy chain variable region sequence set forth in SEQ ID NO:236;
(ci) a light chain variable region comprising a CDR1, a CDR2, and a CDR3 of the light chain variable region sequence set forth in SEQ ID NO:239, and a heavy chain variable region comprising a CDR1, a CDR2, and a CDR3 of the heavy chain variable region sequence set forth in SEQ ID NO:240;
(cj) a light chain variable region comprising a CDR1, a CDR2, and a CDR3 of the light chain variable region sequence set forth in SEQ ID NO:243, and a heavy chain variable region comprising a CDR1, a CDR2, and a CDR3 of the heavy chain variable region sequence set forth in SEQ ID NO:244;
(ck) a light chain variable region comprising a CDR1, a CDR2, and a CDR3 of the light chain variable region sequence set forth in SEQ ID NO:247, and a heavy chain variable region comprising a CDR1, a CDR2, and a CDR3 of the heavy chain variable region sequence set forth in SEQ ID NO:248;
(cl) a light chain variable region comprising a CDR1, a CDR2, and a CDR3 of the light chain variable region sequence set forth in SEQ ID NO:251, and a heavy chain variable region comprising a CDR1, a CDR2, and a CDR3 of the heavy chain variable region sequence set forth in SEQ ID NO:252;
(cm) a light chain variable region comprising a CDR1, a CDR2, and a CDR3 of the light chain variable region sequence set forth in SEQ ID NO:255, and a heavy chain variable region comprising a CDR1, a CDR2, and a CDR3 of the heavy chain variable region sequence set forth in SEQ ID NO:256;
(cn) a light chain variable region comprising a CDR1, a CDR2, and a CDR3 of the light chain variable region sequence set forth in SEQ ID NO:259, and a heavy chain variable region comprising a CDR1, a CDR2, and a CDR3 of the heavy chain variable region sequence set forth in SEQ ID NO:260;
(co) a light chain variable region comprising a CDR1, a CDR2, and a CDR3 of the light chain variable region sequence set forth in SEQ ID NO:263, and a heavy chain variable region comprising a CDR1, a CDR2, and a CDR3 of the heavy chain variable region sequence set forth in SEQ ID NO:264;
(cp) a light chain variable region comprising a CDR1, a CDR2, and a CDR3 of the light chain variable region sequence set forth in SEQ ID NO:267, and a heavy chain variable region comprising a CDR1, a CDR2, and a CDR3 of the heavy chain variable region sequence set forth in SEQ ID NO:268;
(cq) a light chain variable region comprising a CDR1, a CDR2, and a CDR3 of the light chain variable region sequence set forth in SEQ ID NO:271, and a heavy chain variable region comprising a CDR1, a CDR2, and a CDR3 of the heavy chain variable region sequence set forth in SEQ ID NO:272;
(cr) a light chain variable region comprising a CDR1, a CDR2, and a CDR3 of the light chain variable region sequence set forth in SEQ ID NO:275, and a heavy chain variable region comprising a CDR1, a CDR2, and a CDR3 of the heavy chain variable region sequence set forth in SEQ ID NO:276;
(cs) a light chain variable region comprising a CDR1, a CDR2, and a CDR3 of the light chain variable region sequence set forth in SEQ ID NO:279, and a heavy chain variable region comprising a CDR1, a CDR2, and a CDR3 of the heavy chain variable region sequence set forth in SEQ ID NO:280;
(ct) a light chain variable region comprising a CDR1, a CDR2, and a CDR3 of the light chain variable region sequence set forth in SEQ ID NO:283, and a heavy chain variable region comprising a CDR1, a CDR2, and a CDR3 of the heavy chain variable region sequence set forth in SEQ ID NO:284;
(cu) a light chain variable region comprising a CDR1, a CDR2, and a CDR3 of the light chain variable region sequence set forth in SEQ ID NO:287, and a heavy chain variable region comprising a CDR1, a CDR2, and a CDR3 of the heavy chain variable region sequence set forth in SEQ ID NO:288;
(cv) a light chain variable region comprising a CDR1, a CDR2, and a CDR3 of the light chain variable region sequence set forth in SEQ ID NO:291, and a heavy chain variable region comprising a CDR1, a CDR2, and a CDR3 of the heavy chain variable region sequence set forth in SEQ ID NO:292;
(cw) a light chain variable region comprising a CDR1, a CDR2, and a CDR3 of the light chain variable region sequence set forth in SEQ ID NO:303, and a heavy chain variable region comprising a CDR1, a CDR2, and a CDR3 of the heavy chain variable region sequence set forth in SEQ ID NO:304;
(cx) a light chain variable region comprising a CDR1, a CDR2, and a CDR3 of the light chain variable region sequence set forth in SEQ ID NO:295, and a heavy chain variable region comprising a CDR1, a CDR2, and a CDR3 of the heavy chain variable region sequence set forth in SEQ ID NO:296;
(cy) a light chain variable region comprising a CDR1, a CDR2, and a CDR3 of the light chain variable region sequence set forth in SEQ ID NO:917, and a heavy chain variable region comprising a CDR1, a CDR2, and a CDR3 of the heavy chain variable region sequence set forth in SEQ ID NO:915; or
(cz) a light chain variable region comprising a CDR1, a CDR2, and a CDR3 of the light chain variable region sequence set forth in SEQ ID NO:921, and a heavy chain variable region comprising a CDR1, a CDR2, and a CDR3 of the heavy chain variable region sequence set forth in SEQ ID NO:919, thereby inducing tumor cell death in the subject.

21. The method of claim 20, wherein the tumor is selected from the group consisting of multiple myeloma, Non-Hodgkin Lymphoma, Mantle Cell Lymphoma, Hodgkin Lymphoma, Chronic Lymphocytic Leukemia (CLL), Acute lymphocytic leukemia (ALL), Hairy Cell Leukemia, Burkitt's Lymphoma, and Waldenstrom's Macroglobulinemia.

22. The method of claim 20, wherein the immunoresponsive cell is a T cell.
